(19) United States
(12) Patent Application Publication
(10) Pub. No.: US 2025/0382621 A1
(43) Pub. Date: Dec. 18, 2025

(54) IMMUNE EFFECTOR CELL THERAPIES WITH ENHANCED EFFICACY

(71) Applicants: Novartis AG, Basel (CH); The Trustees of the University of Pennsylvania, Philadelphia, PA (US)

(72) Inventors: Gregory Motz, Quincy, MA (US); Konstantinos John Mavrakis, Cambridge, MA (US); Jinbiao Liu, Shanghai (CN); Lei Liu, Shanghai (CN); Qiangang Zheng, Shanghai (CN); Guoliang Xun, Shanghai (CN); Qitao Xiao, Shanghai (CN)

(21) Appl. No.: 19/022,536

(22) Filed: Jan. 15, 2025

Related U.S. Application Data
(63) Continuation of application No. 16/066,855, filed on Jan. 25, 2019, now abandoned.

(30) Foreign Application Priority Data
Dec. 30, 2015 (WO) PCT/CN2015/099882

(51) Int. Cl. C12N 15/113; A61K 40/11; A61K 40/31; A61K 40/42; A61P 35/00; C07D 207/34; C07D 401/14; C07K 16/24; C07K 16/28; C07K 16/30; C12N 5/078; C12N 5/0783

(52) U.S. Cl. CPC C12N 15/1137; A61K 40/11; A61K 40/31; A61K 40/4211; A61K 40/4215; A61P 35/00; C07D 207/34; C07D 401/14; C07K 16/241; C07K 16/2815; C07K 16/2818; C07K 16/2863; C07K 16/3092; C12N 5/0634; C12N 5/0636; A61K 2239/28; A61K 2300/00; C12N 2310/14; C12N 2310/531; C12N 2510/00

(57) ABSTRACT

The present invention relates generally to the use of LSD1 inhibitors in connection with use and manufacture of immune effector cells (e.g., T cells, NK cells), e.g., engineered to express a chimeric antigen receptor (CAR), to treat a subject having a disease, e.g., a disease associated with expression of a tumor antigen.

### RELATED APPLICATIONS

[0001] This application is a continuation of U.S. application Ser. No. 16/066,855, filed Jan. 25, 2019, now abandoned, which is a U.S. national phase application and claims the benefit of priority under 35 U.S.C. § 371 of International Application No. PCT/CN2016/113612, filed Dec. 30, 2016, which claims priority to PCT Patent Application Number PCT/CN2015/099882, filed Dec. 30, 2015, the entire contents of each of which are incorporated herein by reference.

### SEQUENCE LISTING

[0002] The instant application contains a Sequence Listing which has been submitted electronically in XML format and is hereby incorporated by reference in its entirety. Said XML copy, created on Mar. 11, 2025, is named N2067-710520_PAT057188-US_SL.xml and is 2,659,725 bytes in size.

### FIELD OF THE INVENTION

[0003] The present invention relates generally to the use LSD1 inhibitors in connection with use and manufacture of immune effector cells (e.g., T cells, NK cells), e.g., engineered to express a chimeric antigen receptor (CAR), to treat a subject having a disease, e.g., a disease associated with expression of a tumor antigen.

### BACKGROUND OF THE INVENTION

[0004] Adoptive cell transfer (ACT) therapy, for example, with T-cells transduced with Chimeric Antigen Receptors (CARs), has shown promise in cancer trials. There is a medical need for T cell therapies, especially CAR T cell therapies with improved efficacy.

### SUMMARY OF THE INVENTION

[0005] Methods and compositions disclosed herein are directed to the use of an inhibitor of Lysine-specific demethylase 1 (LSD1) in connection with the use and/or manufacture of immune effector cells (e.g., T cells or NK cells), for example, immune effector cells engineered to express a Chimeric Antigen Receptor (CAR), to treat a disease, e.g., a disease associated with expression of a cancer associated antigen (or tumor marker).

[0006] It has been discovered that inhibition of LSD1 is effective in improving the function of immune effector cells, e.g., engineered to express a CAR molecule, e.g., as described herein, and can be combined with T cell, e.g., CAR T cell, therapy and/or manufacturing.

[0007] While not wishing to be bound by theory, it is believed that contacting a population of immune effector cells, e.g., engineered to express a CAR molecule, e.g., as described herein, with an LSD1 inhibitor is accompanied by an increase in the proportion of naive T cells (e.g., CD45RA+CD62L+ T cells, e.g., T_{SCM} cells), at least transiently, relative to an uncontacted population, for example, when such cells are stimulated (e.g., with anti-CD3 and/or anti-CD28 stimulation) or induced to proliferate (e.g., in response to antigen recognition, e.g., antigen recognition through a CAR molecule, e.g., as described herein).

[0008] While not wishing to be bound by theory, it is believed that contacting a population of immune effector cells, e.g., engineered to express a CAR molecule, e.g., as described herein, with an LSD1 inhibitor is accompanied by an increase in the number of naive T cells (e.g., CD45RA+CD62L+ T cells, e.g., T_{SCM} cells), at least transiently, relative to an uncontacted population, for example, when such cells are stimulated (e.g., with anti-CD3 and/or anti-CD28 stimulation) or induced to proliferate (e.g., in response to antigen recognition, e.g., antigen recognition through a CAR).

[0009] While not wishing to be bound by theory, it is believed that contacting a population of immune effector cells, e.g., engineered to express a CAR molecule, e.g., as described herein, with an LSD1 inhibitor is accompanied by a decrease in the number of T_{EM} cells, at least transiently, relative to an uncontacted population, for example, when such cells are stimulated (e.g., with anti-CD3 and/or anti-CD28 stimulation) or induced to proliferate (e.g., in response to antigen recognition, e.g., antigen recognition through a CAR).

[0010] While not wishing to be bound by theory, it is believed that contacting a population of immune effector cells, e.g., engineered to express a CAR molecule, e.g., as described herein, with an LSD1 inhibitor is accompanied by a decrease in the proportion of T_{EM} cells, at least transiently, relative to an uncontacted population, for example, when such cells are stimulated (e.g., with anti-CD3 and/or anti-CD28 stimulation) or induced to proliferate (e.g., in response to antigen recognition, e.g., antigen recognition through a CAR molecule, e.g., as described herein).

[0011] While not wishing to be bound by theory, it is believed that contacting a population of immune effector cells, e.g., engineered to express a CAR molecule, e.g., as described herein, with an LSD1 inhibitor is accompanied by an increase in the production of cytokines (e.g., IFNg and/or IL-2) from said population of immune effector cells, at least transiently, relative to an uncontacted population, for example, when such cells are stimulated (e.g., with anti-CD3 and/or anti-CD28 stimulation) or induced to proliferate (e.g., in response to antigen recognition, e.g., antigen recognition through a CAR molecule, e.g., as described herein).

[0012] While not wishing to be bound by theory, it is believed that contacting a population of immune effector cells, e.g., engineered to express a CAR molecule, e.g., as described herein, with an LSD1 inhibitor is accompanied by a decrease in the proportion of PD-1 positive immune effector cells, at least transiently, relative to an uncontacted population, for example, when such cells are stimulated (e.g., with anti-CD3 and/or anti-CD28 stimulation) or induced to proliferate (e.g., in response to antigen recognition, e.g., antigen recognition through a CAR molecule, e.g., as described herein).

[0013] While not wishing to be bound by theory, it is believed that contacting a population of immune effector cells, e.g., engineered to express a CAR molecule, e.g., as described herein, with an LSD1 inhibitor is accompanied by an increase in the ratio of PD-1 negative immune effector cells/PD-1 positive immune effector cells, at least transiently, relative to an uncontacted population, for example, when such cells are stimulated (e.g., with anti-CD3 and/or anti-CD28 stimulation) or induced to proliferate (e.g., in response to antigen recognition, e.g., antigen recognition through a CAR molecule, e.g., as described herein).

[0014] While not wishing to be bound by theory, it is believed that contacting a population of immune effector cells, e.g., engineered to express a CAR molecule, e.g., as described herein, with an LSD1 inhibitor is accompanied by a decrease in the proportion of PD-1+/Lag3+/Tim3+ immune effector cells, at least transiently, relative to an uncontacted population, for example, when such cells are stimulated (e.g., with anti-CD3 and/or anti-CD28 stimulation) or induced to proliferate (e.g., in response to antigen recognition, e.g., antigen recognition through a CAR molecule, e.g., as described herein).

[0015] While not wishing to be bound by theory, it is believed that contacting a population of immune effector cells, e.g., engineered to express a CAR molecule, e.g., as described herein, with an LSD1 inhibitor is accompanied by an increase in the ratio of PD-1−/Lag3−/Tim3− immune effector cells to PD-1+/Lag3+/Tim3+ immune effector cells, at least transiently, relative to an uncontacted population, for example, when such cells are stimulated (e.g., with anti-CD3 and/or anti-CD28 stimulation) or induced to proliferate (e.g., in response to antigen recognition, e.g., antigen recognition through a CAR molecule, e.g., as described herein).

[0016] While not wishing to be bound by theory, it is believed that contacting a population of immune effector cells, e.g., engineered to express a CAR molecule, e.g., as described herein, with an LSD1 inhibitor is accompanied by an increase in the proliferation of the immune effector cells, at least transiently, relative to an uncontacted population, for example, when such cells are stimulated (e.g., with anti-CD3 and/or anti-CD28 stimulation) or induced to proliferate (e.g., in response to antigen recognition, e.g., antigen recognition through a CAR molecule, e.g., as described herein). Again, without being bound by theory, it is believed that T cells can be exhausted by, for example, stimulation with CD3/CD28 stimulation or antigen stimulation (e.g., by induced signaling through a CAR). Such exhaustion can lead to decreased efficacy or function (e.g., decreased proliferation, persistence, and/or anti-tumor efficacy) of such immune effector cells. As described herein, the inventors have discovered that inhibiting LSD1 increases the proliferation and/or survival of more naive T cells, e.g., T_{SCM} cells, which in turn have better efficacy and function. Thus, embodiments of the invention are based, at least in part, on the recognition that LSD1 inhibition, is associated with improved T cell function and/or phenotype.

[0017] In an embodiment these approaches can be used to optimize the performance of immune effector cells, e.g., T cells, in the subject. While not wishing to be bound by theory, it is believed that, in an embodiment, the performance of endogenous, non-modified immune effector cells, e.g., T cells, is improved. While not wishing to be bound by theory, it is believed that, in an embodiment, the performance of immune effector cells, e.g., T cells, harvested (e.g., from a subject administered an LSD1 inhibitor) and engineered to express a CAR molecule, e.g., as described herein, is improved. In other embodiments, a population of immune effector cells, e.g., T cells, which have been, or will be engineered to express a CAR molecule, e.g., as described herein, can be treated ex vivo by contact with an amount of an LSD1 inhibitor that improves the number or ratio of naive T cells, e.g., T_{SCM} cells, and/or improves the number or ratio of PD-1 negative, e.g., PD-1−/Tim3−/Lag3− T cells, relative to an uncontacted population.

[0018] In an embodiment, the LSD1 inhibitor is administered for an amount of time sufficient to decrease the proportion of PD-1 positive T cells, increase the proportion of PD-1 negative T cells, or increase the ratio of PD-1 negative T cells/PD-1 positive T cells, in the peripheral blood of the subject (or in a preparation of T cells isolated from the subject).

[0019] In an embodiment, the method of treating, e.g., promoting an immune response in, a subject, e.g., a human subject, comprises inhibiting a negative immune response mediated by the engagement of PD-1 with PD-L1 or PD-L2, e.g., relative to a T cell not contacted with an LSD1 inhibitor.

[0020] In an embodiment, the method of treating, e.g., promoting an immune response in, a subject, e.g., a human subject, comprises increasing the number of T cells capable of proliferation, e.g., relative to a T cell not contacted with an LSD1 inhibitor.

[0021] In an embodiment, the method of treating, e.g., promoting an immune response in, a subject, e.g., a human subject, comprises increasing the number of T cells capable of cytotoxic function, secreting cytokines, or activation, e.g., relative to a T cell not contacted with an LSD1 inhibitor.

[0022] In an embodiment, the method of treating, e.g., promoting an immune response in, a subject, e.g., a human subject, comprises increasing the amount of cytokine secretion (e.g., interferon gamma (IFN-g) and/or interleukin 2 (IL-2)) in response to stimulation and/or activation of the T cell, e.g., relative to a T cell not contacted with an LSD1 inhibitor.

[0023] In an embodiment, the LSD1 inhibitor is administered (in vivo or ex vivo) prior to administration of immune effector cells, e.g., T cells to be engineered to express a CAR molecule, e.g., as described herein, (e.g., prior to or after harvest of the immune effector cells) for an amount of time sufficient for one or more of the following to occur:
[0024] 1) an increase in the proportion of naive T cells, e.g., T_{SCM} cells;
[0025] 2) an increase in the number of naive T cells, e.g., T_{SCM} cells;
[0026] 3) a decrease in the number of T_{EM} cells;
[0027] 4) a decrease in the proportion of T_{EM} cells;
[0028] 5) an increase in the proportion of CD45RA+CD62L+ T cells;
[0029] 6) an increase in the number of CD45RA+CD62L+ T cells;
[0030] 7) an increase in the proportion of CD45RA+CCR7+ T cells;
[0031] 8) an increase in the number of CD45RA+CCR7+ T cells;
[0032] 9) a decrease in the proportion of PD-1 positive immune effector cells;
[0033] 10) an increase in the ratio of PD-1 negative immune effector cells/PD-1 positive immune effector cells;
[0034] 11) a decrease in the proportion of PD-1+/Lag3+/Tim3+ immune effector cells;
[0035] 12) an increase in the ratio of PD-1−/Lag3−/Tim3− immune effector cells to PD-1+/Lag3+/Tim3+ immune effector cells;
[0036] 13) an increase in the proliferation of the immune effector cells;
[0037] 14 an increase in the production of cytokines (e.g., IFNg and/or IL-2) from said population of immune effector cells; or
[0038] 15) a combination of two, three, four, five, six, seven, eight, nine, ten, eleven, twelve, thirteen, or more (e.g., all) of the above;
[0039] and wherein 1), 2), 3), 4), 5), 6), 7), 8), 9), 10), 11), 12) 13), 14) or 15) occurs e.g., at least transiently, e.g., permanently, e.g., as compared to a non-treated subject. In an embodiment, the immune effector cell, e.g., T cell, to be engineered to express a CAR molecule, e.g., as described herein, is harvested at least 5, 10, 15, 20, 25, 30, 35, 40, 45, 50, 55, or 60 days after initiation, or completion, of dosing with the LSD1 inhibitor.

[0040] In an embodiment, the LSD1 inhibitor is administered to a subject prior to harvest of immune effector cells, e.g., T cells to be engineered to express an CAR molecule, e.g., as described herein, for an amount of time sufficient for one or more of the following to occur e.g., to occur in the harvested cells or in the engineered cells (or in non-harvested cells, or in both):
[0041] 1) an increase in the proportion of naive T cells, e.g., T_{SCM} cells;
[0042] 2) an increase in the number of naive T cells, e.g., T_{SCM} cells;
[0043] 3) a decrease in the number of T_{EM} cells;
[0044] 4) a decrease in the proportion of T_{EM} cells;
[0045] 5) an increase in the proportion of CD45RA+CD62L+ T cells;
[0046] 6) an increase in the number of CD45RA+CD62L+ T cells;
[0047] 7) an increase in the proportion of CD45RA+CCR7+ T cells;
[0048] 8) an increase in the number of CD45RA+CCR7+ T cells;
[0049] 9) a decrease in the proportion of PD-1 positive immune effector cells;
[0050] 10) an increase in the ratio of PD-1 negative immune effector cells/PD-1 positive immune effector cells;
[0051] 11) a decrease in the proportion of PD-1+/Lag3+/Tim3+ immune effector cells;
[0052] 12) an increase in the ratio of PD-1−/Lag3−/Tim3− immune effector cells to PD-1+/Lag3+/Tim3+ immune effector cells;
[0053] 13) an increase in the proliferation of the immune effector cells;
[0054] 14 an increase in the production of cytokines (e.g., IFNg and/or IL-2) from said population of immune effector cells; or
[0055] 15) a combination of two, three, four, five, six, seven, eight, nine, ten, eleven, twelve, thirteen, or more (e.g., all) of the above;
[0056] and wherein 1), 2), 3), 4), 5), 6), 7), 8), 9), 10), 11), 12) 13), 14) or 15) occurs e.g., at least transiently, e.g., permanently, e.g., as compared to a non-treated subject. In an embodiment, the immune effector cell, e.g., T cell, to be engineered to express a CAR molecule, e.g., as described herein, is harvested at least 5, 10, 15, 20, 25, 30, 35, 40, 45, 50, 55, or 60 days after initiation, or completion, of dosing with the LSD1 inhibitor.

[0057] In an embodiment, the LSD1 inhibitor is administered after harvest of immune effector cells, e.g., T cells to be engineered to express an CAR molecule, e.g., as described herein, for an amount of time sufficient for one or more of the following to occur:
[0058] 1) an increase in the proportion of naive T cells, e.g., T_{SCM} cells;
[0059] 2) an increase in the number of naive T cells, e.g., T_{SCM} cells;
[0060] 3) a decrease in the number of T_{EM} cells;
[0061] 4) a decrease in the proportion of T_{EM} cells;
[0062] 5) an increase in the proportion of CD45RA+CD62L+ T cells;
[0063] 6) an increase in the number of CD45RA+CD62L+ T cells;
[0064] 7) an increase in the proportion of CD45RA+CCR7+ T cells;
[0065] 8) an increase in the number of CD45RA+CCR7+ T cells;
[0066] 9) a decrease in the proportion of PD-1 positive immune effector cells;
[0067] 10) an increase in the ratio of PD-1 negative immune effector cells/PD-1 positive immune effector cells;
[0068] 11) a decrease in the proportion of PD-1+/Lag3+/Tim3+ immune effector cells;
[0069] 12) an increase in the ratio of PD-1−/Lag3−/Tim3− immune effector cells to PD-1+/Lag3+/Tim3+ immune effector cells;
[0070] 13) an increase in the proliferation of the immune effector cells;
[0071] 14 an increase in the production of cytokines (e.g., IFNg and/or IL-2) from said population of immune effector cells; or
[0072] 15) a combination of two, three, four, five, six, seven, eight, nine, ten, eleven, twelve, thirteen, or more (e.g., all) of the above;
[0073] and wherein 1), 2), 3), 4), 5), 6), 7), 8), 9), 10), 11), 12) 13), 14) or 15) occurs e.g., at least transiently, e.g., permanently, e.g., as compared to a non-treated subject.

[0074] In an embodiment, the LSD1 inhibitor is administered after administration of immune effector cells, e.g., T cells to be engineered to express an CAR molecule, e.g., as described herein, for an amount of time sufficient for one or more of the following to occur:
[0075] 1) an increase in the proportion of naive T cells, e.g., T_{SCM} cells;
[0076] 2) an increase in the number of naive T cells, e.g., T_{SCM} cells;
[0077] 3) a decrease in the number of T_{EM} cells;
[0078] 4) a decrease in the proportion of T_{EM} cells;
[0079] 5) an increase in the proportion of CD45RA+CD62L+ T cells;
[0080] 6) an increase in the number of CD45RA+CD62L+ T cells;
[0081] 7) an increase in the proportion of CD45RA+CCR7+ T cells;
[0082] 8) an increase in the number of CD45RA+CCR7+ T cells;
[0083] 9) a decrease in the proportion of PD-1 positive immune effector cells;
[0084] 10) an increase in the ratio of PD-1 negative immune effector cells/PD-1 positive immune effector cells;
[0085] 11) a decrease in the proportion of PD-1+/Lag3+/Tim3+ immune effector cells;
[0086] 12) an increase in the ratio of PD-1−/Lag3−/Tim3− immune effector cells to PD-1+/Lag3+/Tim3+ immune effector cells;
[0087] 13) an increase in the proliferation of the immune effector cells;
[0088] 14 an increase in the production of cytokines (e.g., IFNg and/or IL-2) from said population of immune effector cells; or
[0089] 15) a combination of two, three, four, five, six, seven, eight, nine, ten, eleven, twelve, thirteen, or more (e.g., all) of the above;
[0090] and wherein 1), 2), 3), 4), 5), 6), 7), 8), 9), 10), 11), 12) 13), 14) or 15) occurs e.g., at least transiently, e.g., permanently, e.g., as compared to a non-treated subject.

[0091] In an embodiment, LSD1 inhibitor is administered to immune effector cells, e.g., T cells, which have, or will be engineered to express a CAR molecule, e.g., as described herein, ex vivo for an amount of time sufficient for one or more of the following to occur:
[0092] 1) an increase in the proportion of naive T cells, e.g., T_{SCM} cells;
[0093] 2) an increase in the number of naive T cells, e.g., T_{SCM} cells;
[0094] 3) a decrease in the number of T_{EM} cells;
[0095] 4) a decrease in the proportion of T_{EM} cells;
[0096] 5) an increase in the proportion of CD45RA+CD62L+ T cells;
[0097] 6) an increase in the number of CD45RA+CD62L+ T cells;
[0098] 7) an increase in the proportion of CD45RA+CCR7+ T cells;
[0099] 8) an increase in the number of CD45RA+CCR7+ T cells;
[0100] 9) a decrease in the proportion of PD-1 positive immune effector cells;
[0101] 10) an increase in the ratio of PD-1 negative immune effector cells/PD-1 positive immune effector cells;
[0102] 11) a decrease in the proportion of PD-1+/Lag3+/Tim3+ immune effector cells;
[0103] 12) an increase in the ratio of PD-1−/Lag3−/Tim3− immune effector cells to PD-1+/Lag3+/Tim3+ immune effector cells;
[0104] 13) an increase in the proliferation of the immune effector cells;
[0105] 14 an increase in the production of cytokines (e.g., IFNg and/or IL-2) from said population of immune effector cells; or
[0106] 15) a combination of two, three, four, five, six, seven, eight, nine, ten, eleven, twelve, thirteen, or more (e.g., all) of the above;
[0107] and wherein 1), 2), 3), 4), 5), 6), 7), 8), 9), 10), 11), 12) 13), 14) or 15) occurs e.g., at least transiently, e.g., permanently, e.g., as compared to a non-treated cell.

[0108] Without being bound by theory, it is believed that LSD1 may also directly demethylate p53 (Nature Reviews Molecular Cell Biology 13, 297-311 (May 2012) doi:10.1038/nrm3327). Thus, in an embodiment, the compounds and methods disclosed herein may be used to inhibit demethylation of p53.

[0109] In an embodiment, the subject has cancer and the method comprises promoting the subject's immune response to the cancer. In an embodiment, the subject was selected on the basis of having cancer. In an embodiment, a cell of the cancer expresses PD-L1 or PD-L2. In an embodiment, a cell in the cancer microenvironment expresses PD-L1 or PD-L2.

[0110] In an embodiment, the cancer comprises a solid tumor. In an embodiment, the cancer is a hematological cancer. In an embodiment, the cancer is a leukemia. In an embodiment, the cancer is a chronic lymphocytic leukemia (CLL). In an embodiment, the cancer is CLL and wherein the antigen binding domain of the CAR targets CD19. In an embodiment, the cancer is melanoma.

[0111] In an embodiment, the method further comprises administering an additional treatment, e.g., a chemotherapeutic, radiation, a cellular therapy, or bone marrow transplant to the subject. In an embodiment, the method further comprises administering an additional treatment that kills T cells, e.g., radiation or cytotoxic chemotherapy. In an embodiment, the method further comprises administering to the subject an mTOR pathway inhibitor, such as vitamin E, vitamin A, an antibacterial antibiotic, an antioxidant, L-carnitine, lipoic acid, metformin, resveratrol, leptine, a non-steroid anti-inflammatory drug, or a COX inhibitor. In an embodiment, the method further comprises administering metformin to the subject. In an embodiment, the LSD1 inhibitor is administered prior to or after the initiation of the additional treatment. In an embodiment, the method further comprises administering an additional treatment for the cancer.

[0112] In an embodiment, the method further comprises administering the immune effector cell, e.g., T cell, engineered to express a CAR molecule, e.g., as described herein, in combination with another agent (in addition to the LSD1 inhibitor). In one embodiment, the agent can be a kinase inhibitor, e.g., a CDK4/6 inhibitor, a BTK inhibitor, an mTOR inhibitor, a MNK inhibitor, or a dual mTOR/PI3K kinase inhibitor, and combinations thereof.

[0113] In an embodiment, the method comprises providing an anti-tumor immunity in a mammal. In one embodiment, the cell is an autologous T cell or an autologous NK cell. In one embodiment, the cell is an allogeneic T cell or an allogeneic NK cell. In one embodiment, the mammal is a human.

[0114] In an embodiment the method comprises treating a mammal having a disease associated with expression of a cancer associated antigen or tumor marker.

[0115] In one embodiment, the method comprises administering an agent that increases the efficacy of the immune effector cell, e.g., T cell or NK cell, engineered to express a CAR molecule, e.g., as described herein, e.g., an agent described herein.

[0116] In one embodiment, the method comprises administering an agent that ameliorates one or more side effect associated with administration of a cell expressing a CAR molecule, e.g., as described herein, the immune effector cell, e.g., T cell or NK cell, engineered to express a CAR molecule, e.g., as described herein, e.g., an agent described herein.

[0117] In one embodiment, the method comprises administering an agent that treats the disease associated with a cancer associated antigen as described herein, e.g., an agent described herein.

[0118] In one embodiment, the immune effector cell, e.g., T cell or NK cell, engineered to express a CAR molecule, e.g., as described herein, expresses two or more CAR molecules and, e.g., is administered to a subject in need thereof to treat cancer.

[0119] In one embodiment, the CAR molecule is introduced into immune effector cells (e.g., T cells, NK cells), e.g., using in vitro transcription, and the subject (e.g., human) receives an initial administration of cells comprising a CAR molecule, and one or more subsequent administrations of cells comprising a CAR molecule, wherein the one or more subsequent administrations are administered less than 15 days, e.g., 14, 13, 12, 11, 10, 9, 8, 7, 6, 5, 4, 3, or 2 days after the previous administration. In one embodiment, more than one administration of cells comprising a CAR molecule are administered to the subject (e.g., human) per week, e.g., 2, 3, or 4 administrations of cells comprising a CAR molecule are administered per week. In one embodiment, the subject (e.g., human subject) receives more than one administration of cells comprising a CAR molecule per week (e.g., 2, 3 or 4 administrations per week) (also referred to herein as a cycle), followed by a week of no administration of cells comprising a CAR molecule, and then one or more additional administrations of cells comprising a CAR molecule (e.g., more than one administration of the cells comprising a CAR molecule per week) are administered to the subject. In another embodiment, the subject (e.g., human subject) receives more than one cycle of cells comprising a CAR molecule, and the time between each cycle is less than 10, 9, 8, 7, 6, 5, 4, or 3 days. In one embodiment, the cells comprising a CAR molecule are administered every other day for 3 administrations per week. In one embodiment, the cells comprising a CAR molecule are administered for at least two, three, four, five, six, seven, eight or more weeks.

[0120] In one embodiment, the immune effector cell, e.g., T cell or NK cell, engineered to express a CAR, e.g., a CAR molecule described herein, is administered as a first line treatment for the disease, e.g., the cancer, e.g., the cancer described herein. In another embodiment, the immune effector cell, e.g., T cell, engineered to express a CAR, e.g., a CAR molecule described herein, is administered as a second, third, fourth line treatment for the disease, e.g., the cancer, e.g., the cancer described herein.

[0121] In one embodiment, a population of cells described herein is administered.

[0122] In one embodiment, the LSD1 inhibitor and the immune effector cell, e.g., a T cell, engineered to express a CAR molecule, e.g., as described herein, are present in a single composition, e.g., are administered as a single composition. In one embodiment, LSD1 inhibitor and the immune effector cell, e.g., a T cell, engineered to express a CAR molecule, e.g., as described herein, are present in separate compositions, e.g., are administered as separate compositions.

[0123] In certain aspects, the disclosure provides an LSD1 inhibitor for use in treating a subject, wherein said LSD1 inhibitor enhances an immune response of said subject, and wherein said subject has received, is receiving or is about to receive an immune effector cell engineered to express a CAR molecule, e.g., as described herein.

[0124] In certain aspects, the disclosure provides an immune effector cell engineered to express a CAR molecule, e.g., as described herein for use in treating a subject, wherein said subject has received, is receiving, or is about to receive, an LSD1 inhibitor, e.g., one that enhances an immune response of said subject.

[0125] In certain aspects, the disclosure provides an immune effector cell engineered to express a CAR molecule, e.g., as described herein for use in treating a subject, wherein said immune effector cell engineered to express a CAR molecule, e.g., as described herein has been contacted with an LSD1 inhibitor, e.g., contacted ex vivo with an LSD1 inhibitor.

[0126] In one embodiment, the invention the population of autologous or allogeneic immune effector cells are transfected or transduced with a vector comprising a nucleic acid molecule encoding a CAR molecule, e.g., as described herein. In one embodiment, the vector is a retroviral vector. In one embodiment, the vector is a self-inactivating lentiviral vector as described elsewhere herein. In one embodiment, the vector is delivered (e.g., by transfecting or electroporating) to a cell, e.g., a T cell or a NK cell, wherein the vector comprises a nucleic acid molecule encoding a CAR molecule, e.g., as described herein, which is transcribed as an mRNA molecule, and the CAR molecule is translated from the RNA molecule and expressed on the surface of the cell.

[0127] In an embodiment, a population of CAR-expressing cells, e.g., CAR-expressing T cells (CART cells) or CAR-expressing NK cells, is administered. In some embodiments, the population of CAR-expressing cells comprises a mixture of cells expressing different CARs. For example, in one embodiment, the population of CAR-expressing cells can include a first cell expressing a CAR having an antigen binding domain that binds to a first tumor marker as described herein, and a second cell expressing a CAR having a different antigen binding domain that binds to a second tumor marker as described herein. As another example, the population of CAR-expressing cells can include a first cell expressing a CAR that includes an antigen binding domain that binds to a tumor marker as described herein, and a second cell expressing a CAR that includes an antigen binding domain to a target other than a tumor marker as described herein. In one embodiment, the population of CAR-expressing cells includes, e.g., a first cell expressing a CAR that includes a primary intracellular signaling domain, and a second cell expressing a CAR that includes a secondary signaling domain.

[0128] In one aspect, the invention features a method of treating a subject (e.g., a subject suffering from a disease, e.g., a disease associated with expression of a tumor antigen, e.g., a cancer), that includes administering an LSD1 inhibitor and a population of immune effector cells engineered to express a chimeric antigen receptor (CAR). In embodiments, the method includes administering the LSD1 inhibitor before the population of immune effector cells. In embodiments, the method includes administering the LSD1 inhibitor concurrently with the population of immune effector cells. In embodiments, the method includes administering the LSD1 inhibitor after the population of immune effector cells. In embodiments, the method includes administering the LSD1 inhibitor (e.g., for an interval) before and after the population of immune effector cells is administered.

[0129] In one aspect, the invention features a method of treating a subject (e.g., a subject suffering from a disease, e.g., a disease associated with expression of a tumor antigen, e.g., a cancer), that includes administering an LSD1 inhibitor to the subject, wherein said subject has received, is receiving or is about to receive a population of immune effector cells engineered to express a chimeric antigen receptor (CAR). In embodiments, the method includes administering to a subject an LSD1 inhibitor and a population of immune effector cells engineered to express a CAR molecule, e.g., as described herein. In embodiments, the LSD1 inhibitor is administered before the population of immune effector cells engineered to express a CAR molecule, e.g., as described herein, and wherein said administration of the LSD1 inhibitor is continued for a period of time after the administration of the population of immune effector cells engineered to express a CAR molecule, e.g., as described herein. In other embodiments, the administration of the LSD1 inhibitor after the administration of the population of immune effector cells engineered to express a CAR molecule, e.g., as described herein is in an amount sufficient to increase an anti-tumor effect of the population of immune effector cells engineered to express a CAR molecule, e.g., as described herein relative to an equivalent population of immune effector cells engineered to express a CAR molecule, e.g., as described herein administered in the absence of said LSD1 inhibitor.

[0130] In another aspect, the invention features a method of increasing the therapeutic efficacy in a subject of a population of immune effector cells engineered to express a CAR molecule, e.g., as described herein, e.g., a CAR19 (e.g., CTL019), including a step of decreasing the activity or expression of LSD1 in said cell, at least transiently. In embodiments, the step of decreasing the activity or expression of LSD1 in said cell includes contacting the cell with an LSD1 inhibitor. In embodiments, the contacting is done ex vivo. In embodiments, the contacting is done in vivo (e.g., the population of immune effector cells and the LSD1 inhibitor are coadministered to the subject).

[0131] In embodiments of any of the foregoing aspect, the administration or the contacting of the LSD1 inhibitor results in:
[0132] 1) an increase in the proportion of naive T cells, e.g., T_{SCM} cells;
[0133] 2) an increase in the number of naive T cells, e.g., T_{SCM} cells;
[0134] 3) a decrease in the number of T_{EM} cells;
[0135] 4) a decrease in the proportion of T_{EM} cells;
[0136] 5) an increase in the proportion of CD45RA+CD62L+ T cells;
[0137] 6) an increase in the number of CD45RA+CD62L+ T cells;
[0138] 7) an increase in the proportion of CD45RA+CCR7+ T cells;
[0139] 8) an increase in the number of CD45RA+CCR7+ T cells;
[0140] 9) a decrease in the proportion of PD-1 positive immune effector cells;
[0141] 10) an increase in the ratio of PD-1 negative immune effector cells/PD-1 positive immune effector cells;
[0142] 11) a decrease in the proportion of PD-1+/Lag3+/Tim3+ immune effector cells;
[0143] 12) an increase in the ratio of PD-1−/Lag3−/Tim3− immune effector cells to PD-1+/Lag3+/Tim3+ immune effector cells;
[0144] 13) an increase in the proliferation of the immune effector cells;
[0145] 14 an increase in the production of cytokines (e.g., IFNg and/or IL-2) from said population of immune effector cells; or
[0146] 15) a combination of two, three, four, five, six, seven, eight, nine, ten, eleven, twelve, thirteen, or more (e.g., all) of the above.

[0147] In embodiments, the effect is transient. In embodiments, the effect is permanent. In embodiments, the effect is as compared to cells not contacted with the LSD1 inhibitor. In embodiments, the effect is as compared to cells of the same subject not contacted with the LSD1 inhibitor.

[0148] In another aspect, the invention provides a method of treating a subject that includes:
[0149] a) administering an LSD1 inhibitor to a subject;
[0150] b) collecting a population of immune effector cells from the subject of a), after said administration of the LSD1 inhibitor;
[0151] c) providing said population of immune effector cells ex vivo;
[0152] d) contacting said ex vivo population of immune effector cells with the LSD1 inhibitor, wherein the contacting with the LSD1 inhibitor causes one or more of the following to occur:
[0153] 1) an increase in the proportion of naive T cells, e.g., T_{SCM} cells;
[0154] 2) an increase in the number of naive T cells, e.g., T_{SCM} cells;
[0155] 3) a decrease in the number of T_{EM} cells;
[0156] 4) a decrease in the proportion of T_{EM} cells;
[0157] 5) an increase in the proportion of CD45RA+CD62L+ T cells;
[0158] 6) an increase in the number of CD45RA+CD62L+ T cells;
[0159] 7) an increase in the proportion of CD45RA+CCR7+ T cells;
[0160] 8) an increase in the number of CD45RA+CCR7+ T cells;
[0161] 9) a decrease in the proportion of PD-1 positive immune effector cells;
[0162] 10) an increase in the ratio of PD-1 negative immune effector cells/PD-1 positive immune effector cells;
[0163] 11) a decrease in the proportion of PD-1+/Lag3+/Tim3+ immune effector cells;
[0164] 12) an increase in the ratio of PD-1−/Lag3−/Tim3− immune effector cells to PD-1+/Lag3+/Tim3+ immune effector cells;
[0165] 13) an increase in the proliferation of the immune effector cells;
[0166] 14 an increase in the production of cytokines (e.g., IFNg and/or IL-2) from said population of immune effector cells; or
[0167] 15) a combination of two, three, four, five, six, seven, eight, nine, ten, eleven, twelve, thirteen, or more (e.g., all) of the above;
[0168] and e) administering the population of immune effector cells to a subject.

[0169] In embodiments, the effect of d) is transient. In embodiments, the effect of d) is permanent. In embodiments, the effect of d) is as compared to cells not contacted with the LSD1 inhibitor. In embodiments, the administering of step e) is to the same subject as the subject of step b) (e.g., relates to a method of treatment using a population of autologous immune effector cells). In embodiments, the administering of step e) is to a different subject, e.g., of the same species, as the subject of step b) (e.g., relates to a method of treatment using a population of allogeneic immune effector cells).

[0170] In embodiments, step of e) further includes administering the LSD1 inhibitor to the subject. In embodiments, the method further includes the step of inserting nucleic acid that encodes a CAR molecule, e.g., as described herein into cells of the ex vivo population of immune effector cells.

[0171] In another aspect, the invention features the use of LSD1 inhibitors in the manufacture of a population of immune effector cells, e.g., engineered to express a CAR molecule, e.g., as described herein. In one aspect, the invention provides a method of making a population of immune effector cells, which is optionally a population of T cells, including the steps of
[0172] a) contacting a population of immune effector cells with an LSD1 inhibitor; thereby making a population of immune effector cells, which is optionally a population of T cells, wherein the contacting with the LSD1 inhibitor causes one or more of the following to occur:
[0173] 1) an increase in the proportion of naive T cells, e.g., T_{SCM} cells;
[0174] 2) an increase in the number of naive T cells, e.g., T_{SCM} cells;
[0175] 3) a decrease in the number of T_{EM} cells;
[0176] 4) a decrease in the proportion of T_{EM} cells;
[0177] 5) an increase in the proportion of CD45RA+CD62L+ T cells;
[0178] 6) an increase in the number of CD45RA+CD62L+ T cells;
[0179] 7) an increase in the proportion of CD45RA+CCR7+ T cells;
[0180] 8) an increase in the number of CD45RA+CCR7+ T cells;
[0181] 9) a decrease in the proportion of PD-1 positive immune effector cells;
[0182] 10) an increase in the ratio of PD-1 negative immune effector cells/PD-1 positive immune effector cells;
[0183] 11) a decrease in the proportion of PD-1+/Lag3+/Tim3+ immune effector cells;
[0184] 12) an increase in the ratio of PD-1−/Lag3−/Tim3− immune effector cells to PD-1+/Lag3+/Tim3+ immune effector cells;
[0185] 13) an increase in the proliferation of the immune effector cells;
[0186] 14 an increase in the production of cytokines (e.g., IFNg and/or IL-2) from said population of immune effector cells; or
[0187] 15) a combination of two, three, four, five, six, seven, eight, nine, ten, eleven, twelve, thirteen, or more (e.g., all) of the above.

[0188] In embodiments, the effect of 1)-15) is transient. In embodiments, the effect of 1)-15) is permanent. In embodiments, the effect of 1)-15) is as compared to cells not contacted with the LSD1 inhibitor.

[0189] In embodiments, the method further includes the step of b) inserting nucleic acid that encodes a CAR molecule, e.g., as described herein, into cells of the population of immune effector cells. In embodiments, the contacting of step a) occurs
[0190] 1) prior to;
[0191] 2) concurrently with;
[0192] 3) after; or
[0193] 4) both before and after;
[0194] said inserting of step b). In embodiments, the contacting of step a), and optionally the inserting of step b), is ex vivo.

[0195] In another aspect, the invention features cells, e.g., immune effector cells, e.g., a population of immune effector cells, e.g., engineered to express a CAR molecule, e.g., as described herein, made by any of the methods described in the foregoing aspects.

[0196] In another aspect, the invention features a population of immune effector cells engineered to express a CAR molecule, e.g., as described herein, wherein the CAR includes an antigen-binding domain, a transmembrane domain, and an intracellular signaling domain, and wherein expression and/or function of LSD1 in said cell has been reduced or eliminated. In an embodiment, the reduction or elimination is at least transient. In embodiments, the population of immune effector cells has been contacted with an LSD1 inhibitor. In embodiments the invention features a composition comprising the population of immune effector cells described above and an LSD1 inhibitor.

[0197] In any of the foregoing aspects and embodiments, the cells and/or population of cells are (or include) immune effector cells, e.g., the population of immune effector cells includes, e.g., consists of, T cells or NK cells. In embodiments, the cells are T cells, e.g., CD8+ T cells, CD4+ T cells, or a combination thereof. In embodiments, the cells are NK cells.

[0198] In embodiments, the cells are human cells. In embodiments, the cells are autologous, e.g., to the subject to be administered the cells. In embodiments, the cells are allogeneic, e.g., to the subject to be administered the cells.

[0199] In embodiments, the cells are, or include, cells engineered to express a CAR molecule, e.g., as described herein.

[0200] In any of the foregoing aspects and embodiments involving a CAR, the CAR includes an antigen binding domain (which is optionally an antibody or antibody fragment, TCR or TCR fragment), a transmembrane domain, and an intracellular signaling domain (which is optionally an intracellular signaling domain including a costimulatory domain and/or a primary signaling domain). In embodiments, the antigen-binding domain binds to a tumor antigen is selected from a group consisting of: TSHR, CD19, CD123, CD22, CD30, CD171, CS-1, CLL-1, CD33, EGFRvIII, GD2, GD3, BCMA, Tn Ag, PSMA, ROR1, FLT3, FAP, TAG72, CD38, CD44v6, CEA, EPCAM, B7H3, KIT, IL-13Ra2, Mesothelin, IL-11Ra, PSCA, PRSS21, VEGFR2, LewisY, CD24, PDGFR-beta, SSEA-4, CD20, Folate receptor alpha, ERBB2 (Her2/neu), MUC1, EGFR, NCAM, Prostase, PAP, ELF2M, Ephrin B2, IGF-I receptor, CAIX, LMP2, gp100, bcr-abl, tyrosinase, EphA2, Fucosyl GM1, sLe, GM3, TGS5, HMWMAA, o-acetyl-GD2, Folate receptor beta, TEM1/CD248, TEM7R, CLDN6, GPRC5D, CXORF61, CD97, CD179a, ALK, Polysialic acid, PLAC1, GloboH, NY-BR-1, UPK2, HAVCR1, ADRB3, PANX3, GPR20, LY6K, OR51E2, TARP, WT1, NY-ESO-1, LAGE-la, MAGE-A1, legumain, HPV E6, E7, MAGE A1, ETV6-AML, sperm protein 17, XAGE1, Tie 2, MAD-CT-1, MAD-CT-2, Fos-related antigen 1, p53, p53 mutant, prostein, survivin and telomerase, PCTA-1/Galectin 8, MelanA/MART1, Ras mutant, hTERT, sarcoma translocation breakpoints, ML-IAP, ERG (TMPRSS2 ETS fusion gene), NA17, PAX3, Androgen receptor, Cyclin B1, MYCN, RhoC, TRP-2, CYPIB1, BORIS, SART3, PAX5, OY-TES1, LCK, AKAP-4, SSX2, RAGE-1, human telomerase reverse transcriptase, RU1, RU2, intestinal carboxyl esterase, mut hsp70-2, CD79a, CD79b, CD72, LAIR1, FCAR, LILRA2, CD300LF, CLEC12A, BST2, EMR2, LY75, GPC3, FCRL5, and IGLL1. In one embodiment, the antigen binding domain binds CD19, e.g., is an antigen binding domain as described in, e.g., WO2012/079000 or WO2014/153270. In one embodiment, the antigen binding domain binds BCMA, e.g., is an antigen binding domain as described in, e.g., WO2016/014565, e.g., is the antigen binding domain of CAR BCMA-10 (139109) from WO2016/014565.

[0201] In embodiments, the antigen-binding domain is an antibody or antibody fragment comprising:
[0202] (i) the amino acid sequence of a CD19 binding domain according to Tables 6-9, e.g., the amino acid sequence of CTL019 scFv domain according to Table 9 or an amino acid sequence according to SEQ ID NO: 957, or an amino acid sequence at least 95% identical thereto;
[0203] (ii) the amino acid sequence of a humanized CD19 binding domain according to Tables 6-9, e.g., the amino acid sequence of CAR2 scFv domain according to Table 9 or an amino acid sequence according to SEQ ID NO: 898, or an amino acid sequence at least 95% identical thereto; or
[0204] (iii) the amino acid sequence of a BCMA binding domain according to Tables 11A-11B, e.g., the amino acid sequence of 139109 scFv domain according to Table 11A or an amino acid sequence according to SEQ ID NO: 967, or an amino acid sequence at least 95% identical thereto.

[0205] In embodiments, the transmembrane domain includes:
[0206] (i) an amino acid sequence having at least one, two or three modifications but not more than 20, or 5 modifications of an amino acid sequence of SEQ ID NO: 12, or a sequence with 95-99% identity to an amino acid sequence of SEQ ID NO: 12; or
[0207] (ii) the sequence of SEQ ID NO: 12.

[0208] In embodiments, the antigen binding domain is connected to the transmembrane domain by a hinge region, wherein said hinge region includes SEQ ID NO: 2 or SEQ ID NO: 6, or a sequence with 95-99% identity thereof.

[0209] In embodiments, the intracellular signaling domain includes a primary signaling domain and/or a costimulatory signaling domain, wherein the primary signaling domain includes a functional signaling domain of a protein chosen from CD3 zeta, CD3 gamma, CD3 delta, CD3 epsilon, common FcR gamma (FCERIG), FcR beta (Fc Epsilon Rib), CD79a, CD79b, Fcgamma RIIa, DAP10, or DAP12.

[0210] In embodiments, the primary signaling domain includes:
[0211] (i) an amino acid sequence having at least one, two or three modifications but not more than 20, or 5 modifications of an amino acid sequence of SEQ ID NO: 18 or SEQ ID NO: 20, or a sequence with 95-99% identity to an amino acid sequence of SEQ ID NO: 18 or SEQ ID NO: 20; or
[0212] (ii) the amino acid sequence of SEQ ID NO: 18 or SEQ ID NO: 20.

[0213] In embodiments, the intracellular signaling domain includes a costimulatory signaling domain, or a primary signaling domain and a costimulatory signaling domain, wherein the costimulatory signaling domain includes a functional signaling domain of a protein selected from the group consisting of CD27, CD28, 4-1BB (CD137), OX40, CD30, CD40, PD-1, ICOS, lymphocyte function-associated antigen-1 (LFA-1), CD2, CD7, LIGHT, NKG2C, B7-H3, a ligand that specifically binds with CD83, CDS, ICAM-1, GITR, BAFFR, HVEM (LIGHTR), SLAMF7, NKp80 (KLRF1), CD160, CD19, CD4, CD8alpha, CD8beta, IL2R beta, IL2R gamma, IL7R alpha, ITGA4, VLA1, CD49a, ITGA4, IA4, CD49D, ITGA6, VLA-6, CD49f, ITGAD, CD11d, ITGAE, CD103, ITGAL, CD11a, LFA-1, ITGAM, CD11b, ITGAX, CD11c, ITGB1, CD29, ITGB2, CD18, LFA-1, ITGB7, TNFR2, TRANCE/RANKL, DNAM1 (CD226), SLAMF4 (CD244, 2B4), CD84, CD96 (Tactile), CEACAMI, CRTAM, Ly9 (CD229), CD160 (BY55), PSGL1, CD100 (SEMA4D), CD69, SLAMF6 (NTB-A, Ly108), SLAM (SLAMFI, CD150, IPO-3), BLAME (SLAMF8), SELPLG (CD162), LTBR, LAT, GADS, SLP-76, PAG/Cbp, NKp44, NKp30, NKp46, and NKG2D, e.g., the costimulatory signaling domain includes an amino acid sequence having at least one, two or three modifications but not more than 20, 10 or 5 modifications of an amino acid sequence of SEQ ID NO: 14 or SEQ ID NO: 16, or a sequence with 95-99% identity to an amino acid sequence of SEQ ID NO: 14 or SEQ ID NO: 16, e.g., the costimulatory signaling domain includes a sequence of SEQ ID NO: 14 or SEQ ID NO: 16, e.g., the intracellular domain includes the sequence of SEQ ID NO: 14 or SEQ ID NO: 16, and the sequence of SEQ ID NO: 18 or SEQ ID NO: 20, wherein the sequences including the intracellular signaling domain are expressed in the same frame and as a single polypeptide chain.

[0214] In embodiments, the CAR includes a leader sequence including, e.g., consisting of, SEQ ID NO: 2.

[0215] In embodiments, the CAR comprises:
[0216] (i) the amino acid sequence of a CD19 CAR according to Tables 6-9, e.g., the amino acid sequence of CTL019 according to Table 9 or an amino acid sequence according to SEQ ID NO: 956 or an amino acid sequence at least 95% identical thereto;
[0217] (ii) the amino acid sequence of a humanized CD19 CAR according to Tables 6-9, e.g., the amino acid sequence of CAR2 according to Table 9 or an amino acid sequence according to SEQ ID NO: 902, or an amino acid sequence at least 95% identical thereto; or
[0218] (iii) the amino acid sequence of a BCMA CAR according to Tables 11A-11B, e.g., the amino acid sequence of 139109 CAR according to Table 11A or an amino acid sequence according to SEQ ID NO: 971, or an amino acid sequence at least 95% identical thereto.

[0219] In any of the foregoing aspects and embodiments, the LSD1 inhibitor may be: (1) a gene editing system targeted to one or more sites of the LSD1 gene, or its corresponding regulatory elements; (2) a nucleic acid (e.g., an siRNA or shRNA, or antisense oligonucleotide) including sequence complementary to a target sequence of the LSD1 gene; (3) a protein (e.g., a dominant negative LSD1, e.g., catalytically inactive LSD1, or a dominant negative binding partner of LSD1); (4) a small molecule; (5) a nucleic acid encoding any of (1)-(3); or (6) any combination of (1)-(5).

[0220] In one aspect, the LSD1 inhibitor is an shRNA or siRNA. In embodiments, the LSD1 inhibitor is a shRNA. In embodiments, the LSD1 inhibitor is as siRNA. In embodiments, the shRNA or siRNA includes sequence complementary to a target sequence of the LSD1 gene (KDM1A), e.g., listed in Table 1, e.g., selected from SEQ ID NO: [43] to SEQ ID NO: [82].

[0221] In another aspect, the LSD1 inhibitor is an shRNA encoded by nucleic acid including any sequence encoding an anti-LSD1 shRNA of Table 1, e.g., encoded by nucleic acid including a sequence selected from SEQ ID NO: [83] to SEQ ID NO: [122].

[0222] In another aspect, the LSD1 inhibitor is nucleic acid including any sequence encoding an anti-LSD1 shRNA of Table 1, e.g., a sequence selected from SEQ ID NO: [83] to SEQ ID NO: [122].

[0223] In another aspect, the LSD1 inhibitor is an antisense oligonucleotide. In embodiments, the antisense oligonucleotide includes sequence that is complementary to a sequence of an LSD1 mRNA. In embodiments, the antisense oligonucleotide includes sequence that is complementary to a sequence of an LSD1 pre-mRNA.

[0224] In embodiments, the nucleic acid encoding the LSD1 inhibitor is disposed on a vector, e.g., a vector further including a U6 or H1 promoter operably linked to said nucleic acid, e.g., a retroviral vector, a lentiviral vector, an adenoviral vector, an adeno-associated viral (AAV) vector, a herpes simplex virus (HSV) vector, a plasmid, a minicircle, a nanoplasmid, or an RNA vector. In embodiments the vector further includes sequence encoding a CAR molecule.

[0225] In another aspect, the LSD1 inhibitor is a genome editing system specific for a sequence of the LSD1 gene (KDMIA) or its regulatory elements selected from a CRISPR genome editing system, a zinc finger nuclease genome editing system, a TALEN genome editing system and a meganuclease genome editing system.

[0226] In another aspect, the LSD1 inhibitor is a CRISPR genome editing system including a gRNA molecule including a targeting domain complementary to a sequence of the LSD1 gene (KDM1A) or its regulatory elements, e.g., including any one of SEQ ID NO: [132] to [862].

[0227] In other aspect, the LSD1 inhibitor is a small molecule. In embodiments, the small molecule is a reversible LSD1 inhibitor. In embodiments, the small molecule is an irreversible LSD1 inhibitor. In embodiments, the small molecule LSD1 inhibitor is:
[0228] a) GSK2699537;
[0229] b) rel-2-[[(1R,2S)-2-[4-[(4-chlorophenyl)methoxy]phenyl]cyclopropyl]amino]-1-(4-methyl-1-piperazinyl)-ethanone (described in PCT Publication No. WO 2010043721);
[0230] c) (R)-4-(5-(pyrrolidin-3-ylmethoxy)-2-(p-tolyl)pyridin-3-yl)benzonitrile;
[0231] d) (1S,2R)-N-((2-methoxypyridin-3-yl)methyl)-2-phenylcyclopropan-1-amine;
[0232] e) N,N-dimethyl-1-((4-(4-(4-(piperidin-4-yl)phenyl)-1H-indazol-1-yl)phenyl)sulfonyl)piperidin-4-amine;
[0233] f) 5-(6-chloro-4′-(methylsulfonyl)-[1,1′-biphenyl]-3-yl)-2-(piperazin-1-yl)-1H-pyrrole-3-carbonitrile;
[0234] g) rel-N-[(1R,2S)-2-Phenylcyclopropyl]-4-Piperidinamine; or
[0235] h) 2-(1R,2S)-2-(4-(Benzyloxy)phenyl)cyclopropylamino)-1-(4-methylpiperazin-1-yl)ethanone;
[0236] i) Trans-3-(3-amino-2-methylphenyl)-1-(4-hydroxycyclohexyl)-6-methyl-1H-indole-5-carbonitrile; or
[0237] j) a pharmaceutically acceptable salt of any of the foregoing. In embodiments, the LSD1 inhibitor is a small molecule and said LSD1 inhibitor is conjugated to an antibody or antigen-binding fragment thereof, e.g., an antibody or antigen-binding fragment thereof that recognizes an antigen on the surface of a T cell, e.g., CD3.

[0238] In another aspect, the LSD1 inhibitor is a protein, e.g., is a dominant negative binding partner of LSD1 (e.g., a histone deacetylase (HDAC) that interacts with LSD1 or other member of the Co-REST or AR co-activator complex), or nucleic acid encoding said dominant negative binding partner of LSD1.

[0239] In another aspect, the inhibitor of LSD1 is a protein, e.g., is a dominant negative (e.g., catalytically inactive) LSD1, or nucleic acid encoding said dominant negative LSD1.

[0240] In another aspect, the invention provides a method of treating a subject in need thereof, including administering to said subject an effective amount of the population of immune effector cells of any of the previous aspects and embodiments. In embodiments, the method further includes administering to said subject an LSD1 inhibitor. In embodiments, the subject receives a pre-treatment of an LSD1 inhibitor, prior to the administration of the population of immune effector cells; In embodiments, the subject receives concurrent treatment with an LSD1 inhibitor and the population of immune effector cells; In embodiments, the subject receives treatment with an LSD1 inhibitor after administration of the population of immune effector cells; In embodiments, the subject receives a combination of any of the foregoing.

[0241] In an aspect, including in the previous aspects relating to methods of treatment, the invention relates to methods of treating a subject, wherein the subject has a disease associated with expression of a tumor antigen, e.g., a proliferative disease, a precancerous condition, a cancer, or a non-cancer related indication associated with expression of the tumor antigen. In embodiments, the cancer is a hematologic cancer chosen from one or more of chronic lymphocytic leukemia (CLL), acute leukemias, acute lymphoid leukemia (ALL), acute myeloid leukemia (AML), B-cell acute lymphoid leukemia (B-ALL), T-cell acute lymphoid leukemia (T-ALL), chronic myelogenous leukemia (CML), B cell prolymphocytic leukemia, blastic plasmacytoid dendritic cell neoplasm, Burkitt's lymphoma, diffuse large B cell lymphoma, follicular lymphoma, hairy cell leukemia, small cell- or a large cell-follicular lymphoma, malignant lymphoproliferative conditions, MALT lymphoma, mantle cell lymphoma, marginal zone lymphoma, multiple myeloma, myelodysplasia and myelodysplastic syndrome, non-Hodgkin's lymphoma, Hodgkin's lymphoma, plasmablastic lymphoma, plasmacytoid dendritic cell neoplasm, Waldenstrom macroglobulinemia, or pre-leukemia. In embodiments, the cancer is selected from the group consisting of colon cancer, rectal cancer, renal-cell carcinoma, liver cancer, non-small cell carcinoma of the lung, cancer of the small intestine, cancer of the esophagus, melanoma, bone cancer, pancreatic cancer, skin cancer, cancer of the head or neck, cutaneous or intraocular malignant melanoma, uterine cancer, ovarian cancer, rectal cancer, cancer of the anal region, stomach cancer, testicular cancer, uterine cancer, carcinoma of the fallopian tubes, carcinoma of the endometrium, carcinoma of the cervix, carcinoma of the vagina, carcinoma of the vulva, Hodgkin's Disease, non-Hodgkin's lymphoma, cancer of the endocrine system, cancer of the thyroid gland, cancer of the parathyroid gland, cancer of the adrenal gland, sarcoma of soft tissue, cancer of the urethra, cancer of the penis, solid tumors of childhood, cancer of the bladder, cancer of the kidney or ureter, carcinoma of the renal pelvis, neoplasm of the central nervous system (CNS), primary CNS lymphoma, tumor angiogenesis, spinal axis tumor, brain stem glioma, pituitary adenoma, Kaposi's sarcoma, epidermoid cancer, squamous cell cancer, T-cell lymphoma, environmentally induced cancers, combinations of said cancers, and metastatic lesions of said cancers.

[0242] In another aspect, the invention provides novel compounds. Such compounds are useful, for example, in the methods and compositions described herein, but such uses and compositions are not intended to be limiting. In an embodiment, the invention provides a compound selected from N,N-dimethyl-1-((4-(4-(4-(piperidin-4-yl)phenyl)-1H-indazol-1-yl)phenyl)sulfonyl)piperidin-4-amine and 5-(6-chloro-4′-(methylsulfonyl)biphenyl-3-yl)-2-(piperazin-1-yl)-1H-pyrrole-3-carbonitrile. In an embodiment, the invention provides N,N-dimethyl-1-((4-(4-(4-(piperidin-4-yl)phenyl)-1H-indazol-1-yl)phenyl)sulfonyl)piperidin-4-amine. In an embodiment, the invention provides 5-(6-chloro-4′-(methylsulfonyl)biphenyl-3-yl)-2-(piperazin-1-yl)-1H-pyrrole-3-carbonitrile. The invention further provides a pharmaceutically acceptable salt of any of the foregoing. The invention further provides a compound described above, for use in the manufacture of a medicament. The invention further provides a compound described above, for use as a medicament. The invention further provides a compound described above, for use in the manufacture of a medicament for use as an LSD1 inhibitor, e.g., for use as an LSD1 inhibitor in any of the methods described herein. In an embodiment, the invention provides a compound described above, for use in therapy, alone, or optionally in combination with at least another agent.

[0243] In another aspect, the invention provides a composition for use in ex vivo manufacturing a population of immune effector cells, that includes an LSD1 inhibitor, e.g., a small molecule LSD1 inhibitor. In embodiments, the composition includes the small molecule LSD1 inhibitor at a concentration of ranges from about 0.001 nM to about 10 mM, e.g., from about 0.001 nM to about 100 nM, or from, e.g., about 0.1 uM to about 10 uM.

[0244] In an aspect, the invention provides an LSD1 inhibitor, for use in treating a subject, wherein said subject has received, is receiving, or is about to receive therapy including an immune effector cell, e.g., an immune effector cell engineered to express a CAR molecule, e.g., as described herein.

[0245] In an aspect, the invention provides an LSD1 inhibitor, for use in the manufacture of an immune effector cell, e.g., an immune effector cell engineered to express a CAR molecule, e.g., as described herein.

[0246] In an aspect, the invention provides a method of manufacturing an immune effector cell, e.g., a population of immune effector cells, that includes introducing into said cells nucleic acid encoding a CAR molecule, e.g., as described herein, wherein the nucleic acid integrates into the genome of said cell within the LSD1 gene, such that LSD1 expression and/or function is reduced.

### BRIEF DESCRIPTION OF THE DRAWINGS

[0247] FIG. 1 depicts the percentage of CD8+ T cells from human donors that are CD45RA+CD62L+ after activation using CD3/CD28 in the presence of an LSD1 inhibitor shRNA (molecules 1A, 1B, 2, 3A, 3B, 4 or 6A) compared to control.

[0248] FIG. 2 depicts the percentage of CD4+ T cells from human donors that are CD45RA+CD62L+ after activation using CD3/CD28 in the presence of an LSD1 inhibitor shRNA (molecules 1A, 1B, 2, 3A, 3B, 4 or 6A) compared to control.

[0249] FIG. 3A shows the ability of the indicated compounds to produce T cells of a given phenotype was assessed. Naive human T cells (peripheral pan CD3+ T cells, pooled population) were isolated by negative selection and expanded with anti-CD3/CD28 beads at a 3:1 ratio for 10 days in the presence of the indicated compounds. Compounds were refreshed every 2 days. Following expansion, T cell phenotypes were determined by FACS staining. LSD1 inhibition significantly enhanced the percentage of Tscm cells while reducing the percentage of Tem cells in CD4+ T cells relative to controls and relative to other known conditions.

[0250] FIG. 3B shows the ability of the indicated compounds to produce T cells of a given phenotype was assessed. Naive human T cells (peripheral pan CD3+ T cells, pooled population) were isolated by negative selection and expanded with anti-CD3/CD28 beads at a 3:1 ratio for 10 days in the presence of the indicated compounds. Compounds were refreshed every 2 days. Following expansion, T cell phenotypes were determined by FACS staining. LSD1 inhibition significantly enhanced the percentage of T_{SCM} cells while reducing the percentage of Tem cells in CD8+ T cells relative to controls and relative to other known conditions.

[0251] FIG. 4A shows the effect of LSD1 inhibition in comparison to other compounds believed to affect T cell phenotype on T_{SCM} to T_{EM} ratio in CD4+ cells.

[0252] FIG. 4B shows the effect of LSD1 inhibition in comparison to other compounds believed to affect T cell phenotype on T_{SCM} to T_{EM} ratio in CD8+ cells.

[0253] FIG. 5 shows the expansion of T cells using CD3/CD28 stimulation in the presence of LSD1 inhibitors.

[0254] FIG. 6 shows the expression of checkpoint proteins PD1, Tim3 and Lag3 on T cells expanded in the presence of LSD1 inhibitors.

[0255] FIG. 7 shows the level of CAR expression on T cells expanded in the presence of LSD1 inhibitors.

[0256] FIG. 8 shows the proportion of CD4+ and CD8+ CART and untransduced T cells in the presence of LSD1 inhibitors.

[0257] FIG. 9 shows the expansion of CART cells and untransduced T cells in the presence of LSD1 inhibitors.

[0258] FIG. 10 shows the cytokine production from CART cells expanded in the presence of LSD1 inhibitors, and then exposed to CD19+ or CD19− tumor cells.

[0259] FIG. 11 shows the effect of LSD1 inhibition in significantly increased proliferative capacity following CAR stimulation. Naive human T cells (peripheral pan CD3+ T cells, pooled population) were isolated from PBMCs by negative selection and expanded with anti-CD3/CD28 beads at a 3:1 ratio for 10 days in the presence of the indicated compounds. T cells were transduced with an anti-CD19 scFV on day 1. Compounds were refreshed every 2 days until day 10 was washed out prior to functional assays. Following expansion, T cells were mixed with CD19+ tumor cells lines NALM6 and Raji, as well as CD19− tumor cell line K562. Tumor cells were irradiated and T cells and tumor cells were mixed at a 1:1 ratio. On day 4 following incubation, T cells were stained for CAR using Protein L and CAR+ T cell numbers were determined by FACS using countbright beads. Proliferation was measured as the number of FACS positive cells detected in the period of time used to count 2500 beads. Data expressed as fold no target (CD19−) control (K562).

[0260] FIG. 12 shows the effects of the indicated compounds on naive human T cells (peripheral pan CD3+ T cells, pooled population) isolated by negative selection from PBMCs and expanded with anti-CD3/CD28 beads at a 3:1 ratio for 10 days in the presence of the indicated compounds. T cells were transduced with an anti-CD19 scFV on day 1. Compounds were refreshed every 2 days until day 10 was washed out prior to functional assays. Following expansion, T cell killing of the luciferized CD19+ NALM6 tumor cell line was assessed. After 20 hours luciferase signal was measured using the Bright-Glo™ Luciferase Assay on the EnVision instrument.

[0261] FIG. 13 shows the in vivo anti-tumor efficacy of CART cells expanded ex vivo in the presence of LSD1 inhibitors.

[0262] FIG. 14A shows the level of expansion of CD4+ T cells (e.g., T_{SCM}) cells in the presence of LSD1 inhibitors.

[0263] FIG. 14B shows the level of expansion of CD8+ T cells (e.g., T_{SCM}) cells in the presence of LSD1 inhibitors.

[0264] FIG. 15A shows the level of expression of checkpoint proteins PD1, Tim3 and Lag3 on CD4+ T cells expanded in the presence of LSD1 inhibitors.

[0265] FIG. 15B shows the level of expression of checkpoint proteins PD1, Tim3 and Lag3 on CD8+ T cells expanded in the presence of LSD1 inhibitors.

[0266] FIG. 16 depicts the percentage of total T cells expressing PD1, Tim3 or Lag3 (left panel) or co-expressing PD1/Lag3 or PD1/Lag3/Tim3 after expansion in the presence or absence of LSD1 inhibitor.

[0267] FIG. 17 depicts the percentage of CD4+ T cells (left panel) and percentage of CD8+ T cells (right panel) which are Tscm after expansion in the presence or absence of LSD1 inhibitor.

[0268] FIG. 18 depicts the percentage of CD4+ T cells (left panel) and percentage of CD8+ T cells (right panel) which are positive for co-expression of Tim3/Lag3/PD-1 after expansion in the presence or absence of LSD1 inhibitor.

[0269] FIG. 19 depicts an illustration of gating strategy for Tscm, Tem and Tem by flow cytometry analysis.

[0270] FIG. 20 depicts the effects of different concentrations of LSD1 inhibitors on the T cell phenotypic changes after 10 day activation, treatment and expansion in culture. Percentage of Tscm, Tem and Tem of CD3+ T cells, as well as the ratio of subset CD8+/CD4+, Tscm/Tem, and Tscm/Tcm are shown.

[0271] FIG. 21 depicts a dose response curve of the compound 93 (NVS Compound 1) on the subset of CD8+ and CD4+ T cells on induction of Tscm, Tem and Tcm.

[0272] FIG. 22 depicts a dose response curve of the LSD1i-GSK on the subset of CD8+ and CD4+ T cells on induction of Tscm, Tem and Tcm.

[0273] FIG. 23 depicts a dose response curve of the compound 93 and LSD1i-GSK on the CD3+ and CD8+ T cells on induction of Tscm (EC50 shown).

[0274] FIG. 24 shows that Compound A and Compound B showed similar effects on inducing Tscm and reducing Tem at 100 nM started dosing 24 h after activation, when compared with Compound 93.

[0275] FIG. 25 depicts an illustration of gating strategy for Tscm, Tem and Tem in total T cell and CAR+ T cells by flow cytometry analysis.

[0276] FIG. 26 shows FACS analyses for total CD3+ T cells, CAR expression, and CD8+ CAR+vs CD4+ CAR+ ratio in the final CART product in response to different concentrations of LSD1 inhibition by Compound 93.

[0277] FIG. 27 shows FACS analyses for Tscm, Tem, Tem in the total CD8+ T cells of the final CART products in response to different concentrations of LSD1 inhibition by Compound 93.

[0278] FIG. 28 shows FACS analyses for the percentage of Tscm, Tem, Tem in the CAR+CD8+ T cells in response to different concentrations of LSD1 inhibition by Compound 93.

[0279] FIG. 29 shows results from in vitro cytokine assay for IFNg secretion by CART cells with or without LSD1 inhibitor treatment in response to their specific tumor target cells line at an effector to target cells ratio 1.25:1 incubation for 20 hours.

[0280] FIG. 30 shows in vitro CD3+ (total) and CD3+ CAR+ cell proliferation levels in response to their specific irradiated tumor cells lines at an effector to target cells ratio 1:1 for 4 days.

[0281] FIG. 31 shows in vitro CD8+ and CD8+ CAR+ T cell proliferation levels in response to their specific irradiated tumor cells lines at an effector to target cells ratio 1:1 for 4 days.

[0282] FIG. 32 shows in vitro CD4+ and CD4+ CAR+ T cell proliferation levels in response to their specific irradiated tumor cells lines at an effector to target cells ratio 1:1 for 4 days.

[0283] FIG. 33 shows in vivo anti-tumor efficacy of BCMA CART cells against BCMA+ tumor line. UTD=T cells that were not transduced with the CAR gene; LSDi=indicates those populations that were expanded ex vivo in the presence of Compound 93; BCMA 0.167 million=indicates those populations which were transduced with the CAR gene, and the number of CAR+ cells in the population; PBS=no cell control (phosphate buffered saline injection only).

### DETAILED DESCRIPTION

### Definitions

[0284] Unless defined otherwise, all technical and scientific terms used herein have the same meaning as commonly understood by one of ordinary skill in the art to which the invention pertains.

[0285] The term “a” and “an” refers to one or to more than one (i.e., to at least one) of the grammatical object of the article. By way of example, “an element” means one element or more than one element.

[0286] The term “about” when referring to a measurable value such as an amount, a temporal duration, and the like, is meant to encompass variations of 20% or in some instances ±10%, or in some instances ±5%, or in some instances ±1%, or in some instances ±0.1% from the specified value, as such variations are appropriate to perform the disclosed methods.

[0287] The term “Chimeric Antigen Receptor” or alternatively a “CAR” refers to a set of polypeptides, typically two in the simplest embodiments, which when in an immune effector cell, provides the cell with specificity for a target cell, typically a cancer cell, and with intracellular signal generation. In some embodiments, a CAR comprises at least an extracellular antigen binding domain, a transmembrane domain and a cytoplasmic signaling domain (also referred to herein as “an intracellular signaling domain”) comprising a functional signaling domain derived from a stimulatory molecule and/or costimulatory molecule as defined below. In some aspects, the set of polypeptides are contiguous with each other. In some embodiments, the set of polypeptides includes a dimerization switch that, upon the presence of a dimerization molecule, can couple the polypeptides to one another, e.g., can couple an antigen binding domain to an intracellular signaling domain. In one aspect, the stimulatory molecule is the zeta chain associated with the T cell receptor complex. In one aspect, the cytoplasmic signaling domain further comprises one or more functional signaling domains derived from at least one costimulatory molecule as defined below. In one aspect, the costimulatory molecule is chosen from the costimulatory molecules described herein, e.g., 4-1BB (i.e., CD137), CD27 and/or CD28. In one aspect, the CAR comprises a chimeric fusion protein comprising an extracellular antigen binding domain, a transmembrane domain and an intracellular signaling domain comprising a functional signaling domain derived from a stimulatory molecule. In one aspect, the CAR comprises a chimeric fusion protein comprising an extracellular antigen binding domain, a transmembrane domain and an intracellular signaling domain comprising a functional signaling domain derived from a costimulatory molecule and a functional signaling domain derived from a stimulatory molecule. In one aspect, the CAR comprises a chimeric fusion protein comprising an extracellular antigen binding domain, a transmembrane domain and an intracellular signaling domain comprising two functional signaling domains derived from one or more costimulatory molecule(s) and a functional signaling domain derived from a stimulatory molecule. In one aspect, the CAR comprises a chimeric fusion protein comprising an extracellular antigen binding domain, a transmembrane domain and an intracellular signaling domain comprising at least two functional signaling domains derived from one or more costimulatory molecule(s) and a functional signaling domain derived from a stimulatory molecule. In one aspect the CAR comprises an optional leader sequence at the amino-terminus (N-ter) of the CAR fusion protein. In one aspect, the CAR further comprises a leader sequence at the N-terminus of the extracellular antigen binding domain, wherein the leader sequence is optionally cleaved from the antigen binding domain (e.g., a scFv) during cellular processing and localization of the CAR to the cellular membrane.

[0288] A CAR that comprises an antigen binding domain (e.g., a scFv, or TCR) that targets a specific tumor marker X, such as those described herein, is also referred to as XCAR. For example, a CAR that comprises an antigen binding domain that targets CD19 is referred to as CD19CAR.

[0289] The term “signaling domain” refers to the functional portion of a protein which acts by transmitting information within the cell to regulate cellular activity via defined signaling pathways by generating second messengers or functioning as effectors by responding to such messengers.

[0290] The term “antibody,” as used herein, refers to a protein, or polypeptide sequence derived from an immunoglobulin molecule which specifically binds with an antigen. Antibodies can be polyclonal or monoclonal, multiple or single chain, or intact immunoglobulins, and may be derived from natural sources or from recombinant sources. Antibodies can be tetramers of immunoglobulin molecules.

[0291] The term “antibody fragment” refers to at least one portion of an antibody, that retains the ability to specifically interact with (e.g., by binding, steric hinderance, stabilizing/destabilizing, spatial distribution) an epitope of an antigen. Examples of antibody fragments include, but are not limited to, Fab, Fab′, F(ab′)₂, Fv fragments, scFv antibody fragments, disulfide-linked Fvs (sdFv), a Fd fragment consisting of the VH and CHi domains, linear antibodies, single domain antibodies such as sdAb (either VL or VH), camelid VHH domains, multi-specific antibodies formed from antibody fragments such as a bivalent fragment comprising two Fab fragments linked by a disulfide bridge at the hinge region, and an isolated CDR or other epitope binding fragments of an antibody. An antigen binding fragment can also be incorporated into single domain antibodies, maxibodies, minibodies, nanobodies, intrabodies, diabodies, triabodies, tetrabodies, v-NAR and bis-scFv (see, e.g., Hollinger and Hudson, Nature Biotechnology 23:1126-1136, 2005). Antigen binding fragments can also be grafted into scaffolds based on polypeptides such as a fibronectin type III (Fn3) (see U.S. Pat. No. 6,703,199, which describes fibronectin polypeptide minibodies).

[0292] The term “scFv” refers to a fusion protein comprising at least one antibody fragment comprising a variable region of a light chain and at least one antibody fragment comprising a variable region of a heavy chain, wherein the light and heavy chain variable regions are contiguously linked, e.g., via a synthetic linker, e.g., a short flexible polypeptide linker, and capable of being expressed as a single chain polypeptide, and wherein the scFv retains the specificity of the intact antibody from which it is derived. Unless specified, as used herein an scFv may have the VL and VH variable regions in either order, e.g., with respect to the N-terminal and C-terminal ends of the polypeptide, the scFv may comprise VL-linker-VH or may comprise VH-linker-VL.

[0293] The portion of the CAR of the invention comprising an antibody or antibody fragment thereof may exist in a variety of forms where the antigen binding domain is expressed as part of a contiguous polypeptide chain including, for example, a single domain antibody fragment (sdAb), a single chain antibody (scFv), a humanized antibody or bispecific antibody (Harlow et al., 1999, In: Using Antibodies: A Laboratory Manual, Cold Spring Harbor Laboratory Press, NY; Harlow et al., 1989, In: Antibodies: A Laboratory Manual, Cold Spring Harbor, New York; Houston et al., 1988, Proc. Natl. Acad. Sci. USA 85:5879-5883; Bird et al., 1988, Science 242:423-426). In one aspect, the antigen binding domain of a CAR composition of the invention comprises an antibody fragment. In a further aspect, the CAR comprises an antibody fragment that comprises a scFv. The precise amino acid sequence boundaries of a given CDR can be determined using any of a number of well-known schemes, including those described by Kabat et al. (1991), “Sequences of Proteins of Immunological Interest,” 5th Ed. Public Health Service, National Institutes of Health, Bethesda, MD (“Kabat” numbering scheme), Al-Lazikani et al., (1997) JMB 273, 927-948 (“Chothia” numbering scheme), or a combination thereof.

[0294] As used herein, the term “binding domain” or “antibody molecule” refers to a protein, e.g., an immunoglobulin chain or fragment thereof, comprising at least one immunoglobulin variable domain sequence. The term “binding domain” or “antibody molecule” encompasses antibodies and antibody fragments. In an embodiment, an antibody molecule is a multispecific antibody molecule, e.g., it comprises a plurality of immunoglobulin variable domain sequences, wherein a first immunoglobulin variable domain sequence of the plurality has binding specificity for a first epitope and a second immunoglobulin variable domain sequence of the plurality has binding specificity for a second epitope. In an embodiment, a multispecific antibody molecule is a bispecific antibody molecule. A bispecific antibody has specificity for no more than two antigens. A bispecific antibody molecule is characterized by a first immunoglobulin variable domain sequence which has binding specificity for a first epitope and a second immunoglobulin variable domain sequence that has binding specificity for a second epitope.

[0295] The term “antibody heavy chain,” refers to the larger of the two types of polypeptide chains present in antibody molecules in their naturally occurring conformations, and which normally determines the class to which the antibody belongs.

[0296] The term “antibody light chain,” refers to the smaller of the two types of polypeptide chains present in antibody molecules in their naturally occurring conformations. Kappa (_) and lambda (_) light chains refer to the two major antibody light chain isotypes.

[0297] The term “recombinant antibody” refers to an antibody which is generated using recombinant DNA technology, such as, for example, an antibody expressed by a bacteriophage or yeast expression system. The term should also be construed to mean an antibody which has been generated by the synthesis of a DNA molecule encoding the antibody and which DNA molecule expresses an antibody protein, or an amino acid sequence specifying the antibody, wherein the DNA or amino acid sequence has been obtained using recombinant DNA or amino acid sequence technology which is available and well known in the art.

[0298] The term “antigen” or “Ag” refers to a molecule that provokes an immune response. This immune response may involve either antibody production, or the activation of specific immunologically-competent cells, or both. The skilled artisan will understand that any macromolecule, including virtually all proteins or peptides, can serve as an antigen. Furthermore, antigens can be derived from recombinant or genomic DNA. A skilled artisan will understand that any DNA, which comprises a nucleotide sequences or a partial nucleotide sequence encoding a protein that elicits an immune response, therefore encodes an “antigen” as that term is used herein. Furthermore, one skilled in the art will understand that an antigen need not be encoded solely by a full length nucleotide sequence of a gene. It is readily apparent that the present invention includes, but is not limited to, the use of partial nucleotide sequences of more than one gene and that these nucleotide sequences are arranged in various combinations to encode polypeptides that elicit the desired immune response. Moreover, a skilled artisan will understand that an antigen need not be encoded by a “gene” at all. It is readily apparent that an antigen can be synthesized or can be derived from a biological sample, or might be a macromolecule besides a polypeptide. Such a biological sample can include, but is not limited to a tissue sample, a tumor sample, a cell or a fluid with other biological components.

[0299] The term “anti-cancer effect” refers to a biological effect which can be manifested by various means, including but not limited to, e.g., a decrease in tumor volume, a decrease in the number of cancer cells, a decrease in the number of metastases, an increase in life expectancy, decrease in cancer cell proliferation, decrease in cancer cell survival, or amelioration of various physiological symptoms associated with the cancerous condition. An “anti-cancer effect” can also be manifested by the ability of the peptides, polynucleotides, cells and antibodies in prevention of the occurrence of cancer in the first place. The term “anti-tumor effect” refers to a biological effect which can be manifested by various means, including but not limited to, e.g., a decrease in tumor volume, a decrease in the number of tumor cells, a decrease in tumor cell proliferation, an increase in tumor cell death, an increase in tumor cell apoptosis, or a decrease in tumor cell survival.

[0300] The term “autologous” refers to any material derived from the same individual to whom it is later to be re-introduced into the individual.

[0301] The term “allogeneic” refers to any material derived from a different animal of the same species as the individual to whom the material is introduced. Two or more individuals are said to be allogeneic to one another when the genes at one or more loci are not identical. In some aspects, allogeneic material from individuals of the same species may be sufficiently unlike genetically to interact antigenically.

[0302] The term “xenogeneic” refers to a graft derived from an animal of a different species.

[0303] The term “cancer” refers to a disease characterized by the uncontrolled growth of aberrant cells. Cancer cells can spread locally or through the bloodstream and lymphatic system to other parts of the body. Examples of various cancers are described herein and include but are not limited to, breast cancer, prostate cancer, ovarian cancer, cervical cancer, skin cancer, pancreatic cancer, colorectal cancer, renal cancer, liver cancer, brain cancer, lymphoma, leukemia, lung cancer and the like. The terms “tumor” and “cancer” are used interchangeably herein, e.g., both terms encompass solid and liquid, e.g., diffuse or circulating, tumors. As used herein, the term “cancer” or “tumor” includes premalignant, as well as malignant cancers and tumors.

[0304] “Derived from” as that term is used herein, indicates a relationship between a first and a second molecule. It generally refers to structural similarity between the first molecule and a second molecule and does not connotate or include a process or source limitation on a first molecule that is derived from a second molecule. For example, in the case of an intracellular signaling domain that is derived from a CD3zeta molecule, the intracellular signaling domain retains sufficient CD3zeta structure such that it has the required function, namely, the ability to generate a signal under the appropriate conditions. It does not connotate or include a limitation to a particular process of producing the intracellular signaling domain, e.g., it does not mean that, to provide the intracellular signaling domain, one must start with a CD3zeta sequence and delete unwanted sequence, or impose mutations, to arrive at the intracellular signaling domain.

[0305] The phrase “disease associated with expression of a tumor antigen as described herein” includes, but is not limited to, a disease associated with expression of a tumor antigen as described herein or condition associated with cells which express a tumor antigen as described herein including, e.g., proliferative diseases such as a cancer or malignancy or a precancerous condition such as a myelodysplasia, a myelodysplastic syndrome or a preleukemia; or a noncancer related indication associated with cells which express a tumor antigen as described herein. In one aspect, a cancer associated with expression of a tumor antigen as described herein is a hematological cancer. In one aspect, a cancer associated with expression of a tumor antigen as described herein is a solid cancer. Further diseases associated with expression of a tumor antigen described herein include, but not limited to, e.g., atypical and/or non-classical cancers, malignancies, precancerous conditions or proliferative diseases associated with expression of a tumor antigen as described herein. Non-cancer related indications associated with expression of a tumor antigen as described herein include, but are not limited to, e.g., autoimmune disease, (e.g., lupus), inflammatory disorders (allergy and asthma) and transplantation. In some embodiments, the tumor antigen-expressing cells express, or at any time expressed, mRNA encoding the tumor antigen. In an embodiment, the tumor antigen-expressing cells produce the tumor antigen protein (e.g., wild-type or mutant), and the tumor antigen protein may be present at normal levels or reduced levels. In an embodiment, the tumor antigen-expressing cells produced detectable levels of a tumor antigen protein at one point, and subsequently produced substantially no detectable tumor antigen protein.

[0306] The term “conservative sequence modifications” refers to amino acid modifications that do not significantly affect or alter the binding characteristics of the antibody or antibody fragment containing the amino acid sequence. Such conservative modifications include amino acid substitutions, additions and deletions. Modifications can be introduced into an antibody or antibody fragment of the invention by standard techniques known in the art, such as site-directed mutagenesis and PCR-mediated mutagenesis. Conservative amino acid substitutions are ones in which the amino acid residue is replaced with an amino acid residue having a similar side chain. Families of amino acid residues having similar side chains have been defined in the art. These families include amino acids with basic side chains (e.g., lysine, arginine, histidine), acidic side chains (e.g., aspartic acid, glutamic acid), uncharged polar side chains (e.g., glycine, asparagine, glutamine, serine, threonine, tyrosine, cysteine, tryptophan), nonpolar side chains (e.g., alanine, valine, leucine, isoleucine, proline, phenylalanine, methionine), beta-branched side chains (e.g., threonine, valine, isoleucine) and aromatic side chains (e.g., tyrosine, phenylalanine, tryptophan, histidine). Thus, one or more amino acid residues within a CAR of the invention can be replaced with other amino acid residues from the same side chain family and the altered CAR can be tested using the functional assays described herein.

[0307] The term “stimulation,” refers to a primary response induced by binding of a stimulatory molecule (e.g., a TCR/CD3 complex or CAR) with its cognate ligand (or tumor antigen in the case of a CAR) thereby mediating a signal transduction event, such as, but not limited to, signal transduction via the TCR/CD3 complex or signal transduction via the appropriate NK receptor or signaling domains of the CAR. Stimulation can mediate altered expression of certain molecules.

[0308] The term “stimulatory molecule,” refers to a molecule expressed by an immune cell (e.g., T cell, NK cell, B cell) that provides the cytoplasmic signaling sequence(s) that regulate activation of the immune cell in a stimulatory way for at least some aspect of the immune cell signaling pathway. In one aspect, the-signal is a primary signal that is initiated by, for instance, binding of a TCR/CD3 complex with an MHC molecule loaded with peptide, and which leads to mediation of a T cell response, including, but not limited to, proliferation, activation, differentiation, and the like. A primary cytoplasmic signaling sequence (also referred to as a “primary signaling domain”) that acts in a stimulatory manner may contain a signaling motif which is known as immunoreceptor tyrosine-based activation motif or ITAM. Examples of an ITAM containing-cytoplasmic signaling sequence that is of particular use in the invention include, but are not limited to, those derived from CD3 zeta, common FcR gamma (FCER1G), Fc gamma RIIa, FcR beta (Fc Epsilon R1b), CD3 gamma, CD3 delta, CD3 epsilon, CD79a, CD79b, DAP10, and DAP12. In a specific CAR of the invention, the intracellular signaling domain in any one or more CARS of the invention comprises an intracellular signaling sequence, e.g., a primary signaling sequence of CD3-zeta. In a specific CAR of the invention, the primary signaling sequence of CD3-zeta is the sequence provided as SEQ ID NO: 18, or the equivalent residues from a non-human species, e.g., mouse, rodent, monkey, ape and the like. In a specific CAR of the invention, the primary signaling sequence of CD3-zeta is the sequence as provided in SEQ ID NO:20, or the equivalent residues from a non-human species, e.g., mouse, rodent, monkey, ape and the like.

[0309] The term “antigen presenting cell” or “APC” refers to an immune system cell such as an accessory cell (e.g., a B-cell, a dendritic cell, and the like) that displays a foreign antigen complexed with major histocompatibility complexes (MHC's) on its surface. T-cells may recognize these complexes using their T-cell receptors (TCRs). APCs process antigens and present them to T-cells.

[0310] An “intracellular signaling domain,” as the term is used herein, refers to an intracellular portion of a molecule. The intracellular signaling domain generates a signal that promotes an immune effector function of the CAR containing cell, e.g., a CART cell. Examples of immune effector function, e.g., in a CART cell, include cytolytic activity and helper activity, including the secretion of cytokines.

[0311] In an embodiment, the intracellular signaling domain can comprise a primary intracellular signaling domain. Exemplary primary intracellular signaling domains include those derived from the molecules responsible for primary stimulation, or antigen dependent simulation. In an embodiment, the intracellular signaling domain can comprise a costimulatory intracellular domain. Exemplary costimulatory intracellular signaling domains include those derived from molecules responsible for costimulatory signals, or antigen independent stimulation. For example, in the case of a CART, a primary intracellular signaling domain can comprise a cytoplasmic sequence of a T cell receptor, and a costimulatory intracellular signaling domain can comprise cytoplasmic sequence from co-receptor or costimulatory molecule.

[0312] A primary intracellular signaling domain can comprise a signaling motif which is known as an immunoreceptor tyrosine-based activation motif or ITAM. Examples of ITAM containing primary cytoplasmic signaling sequences include, but are not limited to, those derived from CD3 zeta, common FcR gamma (FCER1G), Fc gamma RIIa, FcR beta (Fc Epsilon Rib), CD3 gamma, CD3 delta, CD3 epsilon, CD79a, CD79b, DAP10, and DAP12.

[0313] The term “zeta” or alternatively “zeta chain”, “CD3-zeta” (or “CD3zeta, CD3 zeta or CD3z) or “TCR-zeta” is defined as the protein provided as GenBan Acc. No. BAG36664.1, or the equivalent residues from a non-human species, e.g., mouse, rodent, monkey, ape and the like, and a “zeta stimulatory domain” or alternatively a “CD3-zeta stimulatory domain” or a “TCR-zeta stimulatory domain” is defined as the amino acid residues from the cytoplasmic domain of the zeta chain, or functional derivatives thereof, that are sufficient to functionally transmit an initial signal necessary for T cell activation. In one aspect the cytoplasmic domain of zeta comprises residues 52 through 164 of GenBank Acc. No. BAG36664.1 or the equivalent residues from a non-human species, e.g., mouse, rodent, monkey, ape and the like, that are functional orthologs thereof. In one aspect, the “zeta stimulatory domain” or a “CD3-zeta stimulatory domain” is the sequence provided as SEQ ID NO: 18. In one aspect, the “zeta stimulatory domain” or a “CD3-zeta stimulatory domain” is the sequence provided as SEQ ID NO:20.

[0314] The term a “costimulatory molecule” refers to a cognate binding partner on a T cell that specifically binds with a costimulatory ligand, thereby mediating a costimulatory response by the T cell, such as, but not limited to, proliferation. Costimulatory molecules are cell surface molecules other than antigen receptors or their ligands that are contribute to an efficient immune response. Costimulatory molecules include, but are not limited to an MHC class I molecule, BTLA and a Toll ligand receptor, as well as OX40, CD27, CD28, CDS, ICAM-1, LFA-1 (CD11a/CD18), ICOS (CD278), and 4-1BB (CD137). Further examples of such costimulatory molecules include CDS, ICAM-1, GITR, BAFFR, HVEM (LIGHTR), SLAMF7, NKp80 (KLRF1), NKp44, NKp30, NKp46, CD160, CD19, CD4, CD8alpha, CD8beta, IL2R beta, IL2R gamma, IL7R alpha, ITGA4, VLA1, CD49a, ITGA4, IA4, CD49D, ITGA6, VLA-6, CD49f, ITGAD, CD11d, ITGAE, CD103, ITGAL, CD11a, LFA-1, ITGAM, CD11b, ITGAX, CD11c, ITGB1, CD29, ITGB2, CD18, LFA-1, ITGB7, NKG2D, NKG2C, TNFR2, TRANCE/RANKL, DNAM1 (CD226), SLAMF4 (CD244, 2B4), CD84, CD96 (Tactile), CEACAMI, CRTAM, Ly9 (CD229), CD160 (BY55), PSGL1, CD100 (SEMA4D), CD69, SLAMF6 (NTB-A, Ly108), SLAM (SLAMFI, CD150, IPO-3), BLAME (SLAMF8), SELPLG (CD162), LTBR, LAT, GADS, SLP-76, PAG/Cbp, CD19a, and a ligand that specifically binds with CD83.

[0315] A costimulatory intracellular signaling domain can be the intracellular portion of a costimulatory molecule. A costimulatory molecule can be represented in the following protein families: TNF receptor proteins, Immunoglobulin-like proteins, cytokine receptors, integrins, signaling lymphocytic activation molecules (SLAM proteins), and activating NK cell receptors. Examples of such molecules include CD27, CD28, 4-1BB (CD137), OX40, GITR, CD30, CD40, ICOS, BAFFR, HVEM, ICAM-1, lymphocyte function-associated antigen-1 (LFA-1), CD2, CDS, CD7, CD287, LIGHT, NKG2C, NKG2D, SLAMF7, NKp80, NKp30, NKp44, NKp46, CD160, B7-H3, and a ligand that specifically binds with CD83, and the like.

[0316] The intracellular signaling domain can comprise the entire intracellular portion, or the entire native intracellular signaling domain, of the molecule from which it is derived, or a functional fragment or derivative thereof.

[0317] The term “4-1BB” refers to a member of the TNFR superfamily with an amino acid sequence provided as GenBank Acc. No. AAA62478.2, or the equivalent residues from a non-human species, e.g., mouse, rodent, monkey, ape and the like; and a “4-1BB costimulatory domain” is defined as amino acid residues 214-255 of GenBank Acc. No. AAA62478.2, or the equivalent residues from a non-human species, e.g., mouse, rodent, monkey, ape and the like. In one aspect, the “4-1BB costimulatory domain” is the sequence provided as SEQ ID NO: 14 or the equivalent residues from a non-human species, e.g., mouse, rodent, monkey, ape and the like.

[0318] “Immune effector cell,” as that term is used herein, refers to a cell that is involved in an immune response, e.g., in the promotion of an immune effector response. Examples of immune effector cells include T cells, e.g., alpha/beta T cells and gamma/delta T cells, B cells, natural killer (NK) cells, natural killer T (NKT) cells, mast cells, and myeloic-derived phagocytes.

[0319] “Immune effector function or immune effector response,” as that term is used herein, refers to function or response, e.g., of an immune effector cell, that enhances or promotes an immune attack of a target cell. E.g., an immune effector function or response refers a property of a T or NK cell that promotes killing or inhibition of growth or proliferation, of a target cell. In the case of a T cell, primary stimulation and co-stimulation are examples of immune effector function or response.

[0320] The term “encoding” refers to the inherent property of specific sequences of nucleotides in a polynucleotide, such as a gene, a cDNA, or an mRNA, to serve as templates for synthesis of other polymers and macromolecules in biological processes having either a defined sequence of nucleotides (e.g., rRNA, tRNA and mRNA) or a defined sequence of amino acids and the biological properties resulting therefrom. Thus, a gene, cDNA, or RNA, encodes a protein if transcription and translation of mRNA corresponding to that gene produces the protein in a cell or other biological system. Both the coding strand, the nucleotide sequence of which is identical to the mRNA sequence and is usually provided in sequence listings, and the non-coding strand, used as the template for transcription of a gene or cDNA, can be referred to as encoding the protein or other product of that gene or cDNA.

[0321] Unless otherwise specified, a “nucleotide sequence encoding an amino acid sequence” includes all nucleotide sequences that are degenerate versions of each other and that encode the same amino acid sequence. The phrase nucleotide sequence that encodes a protein or a RNA may also include introns to the extent that the nucleotide sequence encoding the protein may in some version contain an intron(s).

[0322] The term “effective amount” or “therapeutically effective amount” are used interchangeably herein, and refer to an amount of a compound, formulation, material, or composition, as described herein effective to achieve a particular biological result.

[0323] The term “endogenous” refers to any material from or produced inside an organism, cell, tissue or system.

[0324] The term “exogenous” refers to any material introduced from or produced outside an organism, cell, tissue or system.

[0325] The term “expression” refers to the transcription and/or translation of a particular nucleotide sequence driven by a promoter.

[0326] The term “transfer vector” refers to a composition of matter which comprises an isolated nucleic acid and which can be used to deliver the isolated nucleic acid to the interior of a cell. Numerous vectors are known in the art including, but not limited to, linear polynucleotides, polynucleotides associated with ionic or amphiphilic compounds, plasmids, and viruses. Thus, the term “transfer vector” includes an autonomously replicating plasmid or a virus. The term should also be construed to further include non-plasmid and non-viral compounds which facilitate transfer of nucleic acid into cells, such as, for example, a polylysine compound, liposome, and the like. Examples of viral transfer vectors include, but are not limited to, adenoviral vectors, adeno-associated virus vectors, retroviral vectors, lentiviral vectors, and the like.

[0327] The term “expression vector” refers to a vector comprising a recombinant polynucleotide comprising expression control sequences operatively linked to a nucleotide sequence to be expressed. An expression vector comprises sufficient cis-acting elements for expression; other elements for expression can be supplied by the host cell or in an in vitro expression system. Expression vectors include all those known in the art, including cosmids, plasmids (e.g., naked or contained in liposomes) and viruses (e.g., lentiviruses, retroviruses, adenoviruses, and adeno-associated viruses) that incorporate the recombinant polynucleotide.

[0328] The term “lentivirus” refers to a genus of the Retroviridae family. Lentiviruses are unique among the retroviruses in being able to infect non-dividing cells; they can deliver a significant amount of genetic information into the DNA of the host cell, so they are one of the most efficient methods of a gene delivery vector. HIV, SIV, and FIV are all examples of lentiviruses.

[0329] The term “lentiviral vector” refers to a vector derived from at least a portion of a lentivirus genome, including especially a self-inactivating lentiviral vector as provided in Milone et al., Mol. Ther. 17(8): 1453-1464 (2009). Other examples of lentivirus vectors that may be used in the clinic, include but are not limited to, e.g., the LENTIVECTOR® gene delivery technology from Oxford BioMedica, the LENTIMAX™ vector system from Lentigen and the like. Nonclinical types of lentiviral vectors are also available and would be known to one skilled in the art.

[0330] The term “homologous” or “identity” refers to the subunit sequence identity between two polymeric molecules, e.g., between two nucleic acid molecules, such as, two DNA molecules or two RNA molecules, or between two polypeptide molecules. When a subunit position in both of the two molecules is occupied by the same monomeric subunit; e.g., if a position in each of two DNA molecules is occupied by adenine, then they are homologous or identical at that position. The homology between two sequences is a direct function of the number of matching or homologous positions; e.g., if half (e.g., five positions in a polymer ten subunits in length) of the positions in two sequences are homologous, the two sequences are 50% homologous; if 90% of the positions (e.g., 9 of 10), are matched or homologous, the two sequences are 90% homologous.

[0331] “Humanized” forms of non-human (e.g., murine) antibodies are chimeric immunoglobulins, immunoglobulin chains or fragments thereof (such as Fv, Fab, Fab′, F(ab′)2 or other antigen-binding subsequences of antibodies) which contain minimal sequence derived from non-human immunoglobulin. For the most part, humanized antibodies and antibody fragments thereof are human immunoglobulins (recipient antibody or antibody fragment) in which residues from a complementary-determining region (CDR) of the recipient are replaced by residues from a CDR of a non-human species (donor antibody) such as mouse, rat or rabbit having the desired specificity, affinity, and capacity. In some instances, Fv framework region (FR) residues of the human immunoglobulin are replaced by corresponding non-human residues. Furthermore, a humanized antibody/antibody fragment can comprise residues which are found neither in the recipient antibody nor in the imported CDR or framework sequences. These modifications can further refine and optimize antibody or antibody fragment performance. In general, the humanized antibody or antibody fragment thereof will comprise substantially all of at least one, and typically two, variable domains, in which all or substantially all of the CDR regions correspond to those of a non-human immunoglobulin and all or a significant portion of the FR regions are those of a human immunoglobulin sequence. The humanized antibody or antibody fragment can also comprise at least a portion of an immunoglobulin constant region (Fc), typically that of a human immunoglobulin. For further details, see Jones et al., Nature, 321: 522-525, 1986; Reichmann et al., Nature, 332: 323-329, 1988; Presta, Curr. Op. Struct. Biol., 2: 593-596, 1992.

[0332] “Fully human” refers to an immunoglobulin, such as an antibody or antibody fragment, where the whole molecule is of human origin or consists of an amino acid sequence identical to a human form of the antibody or immunoglobulin.

[0333] The term “isolated” means altered or removed from the natural state. For example, a nucleic acid or a peptide naturally present in a living animal is not “isolated,” but the same nucleic acid or peptide partially or completely separated from the coexisting materials of its natural state is “isolated.” An isolated nucleic acid or protein can exist in substantially purified form, or can exist in a non-native environment such as, for example, a host cell.

[0334] The term “operably linked” or “transcriptional control” refers to functional linkage between a regulatory sequence and a heterologous nucleic acid sequence resulting in expression of the latter. For example, a first nucleic acid sequence is operably linked with a second nucleic acid sequence when the first nucleic acid sequence is placed in a functional relationship with the second nucleic acid sequence. For instance, a promoter is operably linked to a coding sequence if the promoter affects the transcription or expression of the coding sequence. Operably linked DNA sequences can be contiguous with each other and, e.g., where necessary to join two protein coding regions, are in the same reading frame.

[0335] The term “parenteral” administration of an immunogenic composition includes, e.g., subcutaneous (s.c.), intravenous (i.v.), intramuscular (i.m.), or intrasternal injection, intratumoral, or infusion techniques.

[0336] The term “nucleic acid” or “polynucleotide” refers to deoxyribonucleic acids (DNA) or ribonucleic acids (RNA) and polymers thereof in either single- or double-stranded form. Unless specifically limited, the term encompasses nucleic acids containing known analogues of natural nucleotides that have similar binding properties as the reference nucleic acid and are metabolized in a manner similar to naturally occurring nucleotides. Unless otherwise indicated, a particular nucleic acid sequence also implicitly encompasses conservatively modified variants thereof (e.g., degenerate codon substitutions), alleles, orthologs, SNPs, and complementary sequences as well as the sequence explicitly indicated. Specifically, degenerate codon substitutions may be achieved by generating sequences in which the third position of one or more selected (or all) codons is substituted with mixed-base and/or deoxyinosine residues (Batzer et al., Nucleic Acid Res. 19:5081 (1991); Ohtsuka et al., J. Biol. Chem. 260:2605-2608 (1985); and Rossolini et al., Mol. Cell. Probes 8:91-98 (1994)).

[0337] The terms “peptide,” “polypeptide,” and “protein” are used interchangeably, and refer to a compound comprised of amino acid residues covalently linked by peptide bonds. A protein or peptide must contain at least two amino acids, and no limitation is placed on the maximum number of amino acids that can comprise a protein's or peptide's sequence. Polypeptides include any peptide or protein comprising two or more amino acids joined to each other by peptide bonds. As used herein, the term refers to both short chains, which also commonly are referred to in the art as peptides, oligopeptides and oligomers, for example, and to longer chains, which generally are referred to in the art as proteins, of which there are many types. “Polypeptides” include, for example, biologically active fragments, substantially homologous polypeptides, oligopeptides, homodimers, heterodimers, variants of polypeptides, modified polypeptides, derivatives, analogs, fusion proteins, among others. A polypeptide includes a natural peptide, a recombinant peptide, or a combination thereof.

[0338] The term “promoter” refers to a DNA sequence recognized by the synthetic machinery of the cell, or introduced synthetic machinery, required to initiate the specific transcription of a polynucleotide sequence.

[0339] The term “promoter/regulatory sequence” refers to a nucleic acid sequence which is required for expression of a gene product operably linked to the promoter/regulatory sequence. In some instances, this sequence may be the core promoter sequence and in other instances, this sequence may also include an enhancer sequence and other regulatory elements which are required for expression of the gene product. The promoter/regulatory sequence may, for example, be one which expresses the gene product in a tissue specific manner.

[0340] The term “constitutive” promoter refers to a nucleotide sequence which, when operably linked with a polynucleotide which encodes or specifies a gene product, causes the gene product to be produced in a cell under most or all physiological conditions of the cell.

[0341] The term “inducible” promoter refers to a nucleotide sequence which, when operably linked with a polynucleotide which encodes or specifies a gene product, causes the gene product to be produced in a cell substantially only when an inducer which corresponds to the promoter is present in the cell.

[0342] The term “tissue-specific” promoter refers to a nucleotide sequence which, when operably linked with a polynucleotide encodes or specified by a gene, causes the gene product to be produced in a cell substantially only if the cell is a cell of the tissue type corresponding to the promoter.

[0343] The terms “cancer associated antigen” or “tumor antigen” interchangeably refers to a molecule (typically a protein, carbohydrate or lipid) that is expressed on the surface of a cancer cell, either entirely or as a fragment (e.g., MHC/peptide), and which is useful for the preferential targeting of a pharmacological agent to the cancer cell. In some embodiments, a tumor antigen is a marker expressed by both normal cells and cancer cells, e.g., a lineage marker, e.g., CD19 on B cells. In some embodiments, a tumor antigen is a cell surface molecule that is overexpressed in a cancer cell in comparison to a normal cell, for instance, 1-fold over expression, 2-fold overexpression, 3-fold overexpression or more in comparison to a normal cell. In some embodiments, a tumor antigen is a cell surface molecule that is inappropriately synthesized in the cancer cell, for instance, a molecule that contains deletions, additions or mutations in comparison to the molecule expressed on a normal cell. In some embodiments, a tumor antigen will be expressed exclusively on the cell surface of a cancer cell, entirely or as a fragment (e.g., MHC/peptide), and not synthesized or expressed on the surface of a normal cell. In some embodiments, the CARs of the present invention includes CARs comprising an antigen binding domain (e.g., antibody or antibody fragment) that binds to a MHC presented peptide. Normally, peptides derived from endogenous proteins fill the pockets of Major histocompatibility complex (MHC) class I molecules, and are recognized by T cell receptors (TCRs) on CD8+ T lymphocytes. The MHC class I complexes are constitutively expressed by all nucleated cells. In cancer, virus-specific and/or tumor-specific peptide/MHC complexes represent a unique class of cell surface targets for immunotherapy. TCR-like antibodies targeting peptides derived from viral or tumor antigens in the context of human leukocyte antigen (HLA)-A1 or HLA-A2 have been described (see, e.g., Sastry et al., J Virol. 2011 85(5):1935-1942; Sergeeva et al., Blood, 2011 117(16):4262-4272; Verma et al., J Immunol 2010 184(4):2156-2165; Willemsen et al., Gene Ther 2001 8(21):1601-1608; Dao et al., Sci Transl Med 2013 5(176):176ra33; Tassev et al., Cancer Gene Ther 2012 19(2):84-100). For example, TCR-like antibody can be identified from screening a library, such as a human scFv phage displayed library.

[0344] The term “tumor-supporting antigen” or “cancer-supporting antigen” interchangeably refer to a molecule (typically a protein, carbohydrate or lipid) that is expressed on the surface of a cell that is, itself, not cancerous, but supports the cancer cells, e.g., by promoting their growth or survival e.g., resistance to immune cells. Exemplary cells of this type include stromal cells and myeloid-derived suppressor cells (MDSCs). The tumor-supporting antigen itself need not play a role in supporting the tumor cells so long as the antigen is present on a cell that supports cancer cells.

[0345] The term “flexible polypeptide linker” or “linker” as used in the context of a scFv refers to a peptide linker that consists of amino acids such as glycine and/or serine residues used alone or in combination, to link variable heavy and variable light chain regions together. In one embodiment, the flexible polypeptide linker is a Gly/Ser linker and comprises the amino acid sequence (Gly-Gly-Gly-Ser)n, where n is a positive integer equal to or greater than 1. For example, n=1, n=2, n=3. n=4, n=5 and n=6, n=7, n=8, n=9 and n=10 (SEQ ID NO:28). In one embodiment, the flexible polypeptide linkers include, but are not limited to, (Gly4 Ser)4 (SEQ ID NO:29) or (Gly4 Ser)3 (SEQ ID NO:30). In another embodiment, the linkers include multiple repeats of (Gly2Ser), (GlySer) or (Gly3Ser) (SEQ ID NO:31). Also included within the scope of the invention are linkers described in WO2012/138475, incorporated herein by reference.

[0346] As used herein, a 5′ cap (also termed an RNA cap, an RNA 7-methylguanosine cap or an RNA m⁷G cap) is a modified guanine nucleotide that has been added to the “front” or 5′ end of a eukaryotic messenger RNA shortly after the start of transcription. The 5′ cap consists of a terminal group which is linked to the first transcribed nucleotide. Its presence is critical for recognition by the ribosome and protection from RNases. Cap addition is coupled to transcription, and occurs co-transcriptionally, such that each influences the other. Shortly after the start of transcription, the 5′ end of the mRNA being synthesized is bound by a cap-synthesizing complex associated with RNA polymerase. This enzymatic complex catalyzes the chemical reactions that are required for mRNA capping. Synthesis proceeds as a multi-step biochemical reaction. The capping moiety can be modified to modulate functionality of mRNA such as its stability or efficiency of translation.

[0347] As used herein, “in vitro transcribed RNA” refers to RNA, preferably mRNA, that has been synthesized in vitro. Generally, the in vitro transcribed RNA is generated from an in vitro transcription vector. The in vitro transcription vector comprises a template that is used to generate the in vitro transcribed RNA.

[0348] As used herein, a “poly(A)” is a series of adenosines attached by polyadenylation to the mRNA. In a preferred embodiment of a construct for transient expression, the polyA is between 50 and 5000 (SEQ ID NO: 34), preferably greater than 64, more preferably greater than 100, most preferably greater than 300 or 400 poly(A) sequences can be modified chemically or enzymatically to modulate mRNA functionality such as localization, stability or efficiency of translation.

[0349] As used herein, “polyadenylation” refers to the covalent linkage of a polyadenylyl moiety, or its modified variant, to a messenger RNA molecule. In eukaryotic organisms, most messenger RNA (mRNA) molecules are polyadenylated at the 3′ end. The 3′ poly(A) tail is a long sequence of adenine nucleotides (often several hundred) added to the pre-mRNA through the action of an enzyme, polyadenylate polymerase. In higher eukaryotes, the poly(A) tail is added onto transcripts that contain a specific sequence, the polyadenylation signal. The poly(A) tail and the protein bound to it aid in protecting mRNA from degradation by exonucleases. Polyadenylation is also important for transcription termination, export of the mRNA from the nucleus, and translation. Polyadenylation occurs in the nucleus immediately after transcription of DNA into RNA, but additionally can also occur later in the cytoplasm. After transcription has been terminated, the mRNA chain is cleaved through the action of an endonuclease complex associated with RNA polymerase. The cleavage site is usually characterized by the presence of the base sequence AAUAAA near the cleavage site. After the mRNA has been cleaved, adenosine residues are added to the free 3′ end at the cleavage site.

[0350] As used herein in connection with expression, e.g., expression of a CAR molecule, “transient” refers to expression of a non-integrated transgene for a period of hours, days or weeks, wherein the period of time of expression is less than the period of time for expression of the gene if integrated into the genome or contained within a stable plasmid replicon in the host cell.

[0351] As used herein in connection with an effect, e.g., an effect of an LSD1 inhibitor, “transient” means the effect is present for a period of, for example, hours, days, weeks or months, but diminishes (e.g., until the effect is no longer measurable) over a period of time. In embodiments the effect is as measured according to the assays described herein, e.g., in the examples.

[0352] As used herein, the terms “treat”, “treatment” and “treating” refer to the reduction or amelioration of the progression, severity and/or duration of a proliferative disorder, or the amelioration of one or more symptoms (preferably, one or more discernible symptoms) of a proliferative disorder resulting from the administration of one or more therapies (e.g., one or more therapeutic agents such as a CAR of the invention). In specific embodiments, the terms “treat”, “treatment” and “treating” refer to the amelioration of at least one measurable physical parameter of a proliferative disorder, such as growth of a tumor, not necessarily discernible by the patient. In other embodiments the terms “treat”, “treatment” and “treating”-refer to the inhibition of the progression of a proliferative disorder, either physically by, e.g., stabilization of a discernible symptom, physiologically by, e.g., stabilization of a physical parameter, or both. In other embodiments the terms “treat”, “treatment” and “treating” refer to the reduction or stabilization of tumor size or cancerous cell count.

[0353] The term “signal transduction pathway” refers to the biochemical relationship between a variety of signal transduction molecules that play a role in the transmission of a signal from one portion of a cell to another portion of a cell. The phrase “cell surface receptor” includes molecules and complexes of molecules capable of receiving a signal and transmitting signal across the membrane of a cell.

[0354] The term “subject” is intended to include living organisms in which an immune response can be elicited (e.g., mammals, human).

[0355] The term, a “substantially purified” cell refers to a cell that is essentially free of other cell types. A substantially purified cell also refers to a cell which has been separated from other cell types with which it is normally associated in its naturally occurring state. In some instances, a population of substantially purified cells refers to a homogenous population of cells. In other instances, this term refers simply to cell that have been separated from the cells with which they are naturally associated in their natural state. In some aspects, the cells are cultured in vitro. In other aspects, the cells are not cultured in vitro.

[0356] The term “therapeutic” as used herein means a treatment. A therapeutic effect is obtained by reduction, suppression, remission, or eradication of a disease state.

[0357] The term “prophylaxis” as used herein means the prevention of or protective treatment for a disease or disease state.

[0358] The term “transfected” or “transformed” or “transduced” refers to a process by which exogenous nucleic acid is transferred or introduced into the host cell. A “transfected” or “transformed” or “transduced” cell is one which has been transfected, transformed or transduced with exogenous nucleic acid. The cell includes the primary subject cell and its progeny.

[0359] The term “specifically binds,” refers to an antibody, or a ligand, which recognizes and binds with a binding partner (e.g., a tumor antigen) protein present in a sample, but which antibody or ligand does not substantially recognize or bind other molecules in the sample.

[0360] “Regulatable chimeric antigen receptor (RCAR),” as that term is used herein, refers to a set of polypeptides, typically two in the simplest embodiments, which when in a RCARX cell, provides the RCARX cell with specificity for a target cell, typically a cancer cell, and with regulatable intracellular signal generation or proliferation, which can optimize an immune effector property of the RCARX cell. An RCARX cell relies at least in part, on an antigen binding domain to provide specificity to a target cell that comprises the antigen bound by the antigen binding domain. In an embodiment, an RCAR includes a dimerization switch that, upon the presence of a dimerization molecule, can couple an intracellular signaling domain to the antigen binding domain.

[0361] “Membrane anchor” or “membrane tethering domain”, as that term is used herein, refers to a polypeptide or moiety, e.g., a myristoyl group, sufficient to anchor an extracellular or intracellular domain to the plasma membrane.

[0362] “Switch domain,” as that term is used herein, e.g., when referring to an RCAR, refers to an entity, typically a polypeptide-based entity, that, in the presence of a dimerization molecule, associates with another switch domain. The association results in a functional coupling of a first entity linked to, e.g., fused to, a first switch domain, and a second entity linked to, e.g., fused to, a second switch domain. A first and second switch domain are collectively referred to as a dimerization switch. In embodiments, the first and second switch domains are the same as one another, e.g., they are polypeptides having the same primary amino acid sequence, and are referred to collectively as a homodimerization switch. In embodiments, the first and second switch domains are different from one another, e.g., they are polypeptides having different primary amino acid sequences, and are referred to collectively as a heterodimerization switch. In embodiments, the switch is intracellular. In embodiments, the switch is extracellular. In embodiments, the switch domain is a polypeptide-based entity, e.g., FKBP or FRB-based, and the dimerization molecule is small molecule, e.g., a rapalogue. In embodiments, the switch domain is a polypeptide-based entity, e.g., an scFv that binds a myc peptide, and the dimerization molecule is a polypeptide, a fragment thereof, or a multimer of a polypeptide, e.g., a myc ligand or multimers of a myc ligand that bind to one or more myc scFvs. In embodiments, the switch domain is a polypeptide-based entity, e.g., myc receptor, and the dimerization molecule is an antibody or fragments thereof, e.g., myc antibody.

[0363] “Dimerization molecule,” as that term is used herein, e.g., when referring to an RCAR, refers to a molecule that promotes the association of a first switch domain with a second switch domain. In embodiments, the dimerization molecule does not naturally occur in the subject, or does not occur in concentrations that would result in significant dimerization. In embodiments, the dimerization molecule is a small molecule, e.g., rapamycin or a rapalogue, e.g, RAD001.

[0364] The term “bioequivalent” refers to an amount of an agent other than the reference compound, required to produce an effect equivalent to the effect produced by the reference dose or reference amount of the reference compound. In an embodiment the effect is the level of LSD1 inhibition, e.g., as measured by LSD1 protein levels, e.g., as evaluated in an in vivo or in vitro assay, e.g., as measured by an assay described herein, e.g., flow cytometry. In an embodiment, the effect is enhanced proliferation of T_{SCM} cells, e.g., CD45RA+CD62L+ cells, e.g., e.g., enhanced proliferation relative to other T cell phenotypes, e.g., T_{CM} (e.g., CD45RA−CD62L+), T_{EM} (e.g., CD45RA−CD62L−), T_{EFF} or T_{REG} cells, e.g., as measured by cell sorting. In an embodiment, the effect is enhanced proliferation of T_{SCM} cells, e.g., CD45RA+CCR7+ cells, e.g., e.g., enhanced proliferation relative to other T cell phenotypes, e.g., CD45RA−CCR7+, CD45RA−CCR7−, CD45RA+CCR7−, T_{EFF} or T_{REG} cells, e.g., as measured by cell sorting.

[0365] “Refractory” as used herein refers to a disease, e.g., cancer, that does not respond to a treatment. In embodiments, a refractory cancer can be resistant to a treatment before or at the beginning of the treatment. In other embodiments, the refractory cancer can become resistant during a treatment. A refractory cancer is also called a resistant cancer.

[0366] “Relapsed” as used herein refers to the return of a disease (e.g., cancer) or the signs and symptoms of a disease such as cancer after a period of improvement, e.g., after prior treatment of a therapy, e.g., cancer therapy

[0367] “LSD1,” “lysine-specific demethylase 1A,” “Lysine-specific histone demethylase 1A,” “KDM1A,” “AOF2,” “KIAA0601” and “BHC110” are used interchangeably herein, and refer to the gene KDM1A (lysine-specific demethylase 1A) and the protein encoded by said gene, lysine-specific demethylase 1A (LSD1). This gene encodes a nuclear protein containing a SWIRM domain, a FAD-binding motif, and an amine oxidase domain. This protein is a component of several histone deacetylase complexes, through it silences genes by functioning as a histone demethylase. In the human genome, KDM1A is located on chromosome 1 Chr1:23030596 (on Assembly GRCh38). Currently two isoforms of LSD1 are known, and the isoforms are described in GeneBank number NM_001009999.2 and NM_015013.3.

[0368] Examples of the protein sequence of human LSD1 is provided as UniProt accession number 060341-1 having an amino acid sequence as follows:

SEQ ID NO: 40

```
                10 20 30 40
MLSGKKAAAA AAAAAAAATG TEAGPGTAGG SENGSEVAAQ
                50 60 70 80
PAGLSGPAEV GPGAVGERTP RKKEPPRASP PGGLAEPPGS
                90 100 110 120
AGPQAGPTVV PGSATPMETG IAETPEGRRT SRRKRAKVEY
              130 140 150 160
REMDESLANL SEDEYYSEEE RNAKAEKEKK LPPPPPQAPP
              170 180 190 200
EEENESEPEE PSGVEGAAFQ SRLPHDRMTS QEAACFPDII
              210 220 230 240
SGPQQTQKVF LFIRNRTLQL WLDNPKIQLT FEATLQQLEA
              250 260 270 280
PYNSDTVLVH RVHSYLERHG LINFGIYKRI KPLPTKKTGK
              290 300 310 320
VIIIGSGVSG LAAARQLQSF GMDVTLLEAR DRVGGRVATF
              330 340 350 360
RKGNYVADLG AMVVTGLGGN PMAVVSKQVN MELAKIKQKC
              370 380 390 400
PLYEANGQAV PKEKDEMVEQ EFNRLLEATS YLSHQLDFNV
              410 420 430 440
LNNKPVSLGQ ALEVVIQLQE KHVKDEQIEH WKKIVKTQEE
              450 460 470 480
LKELLNKMVN LKEKIKELHQ QYKEASEVKP PRDITAEFLV
              490 500 510 520
KSKHRDLTAL CKEYDELAET QGKLEEKLQE LEANPPSDVY
              530 540 550 560
LSSRDRQILD WHFANLEFAN ATPLSTLSLK HWDQDDDFEF
              570 580 590 600
TGSHLTVRNG YSCVPVALAE GLDIKLNTAV RQVRYTASGC
              610 620 630 640
EVIAVNTRST SQTFIYKCDA VLCTLPLGVL KQQPPAVQFV
              650 660 670 680
PPLPEWKTSA VQRMGFGNLN KVVLCFDRVF WDPSVNLFGH
              690 700 710 720
VGSTTASRGE LELFWNLYKA PILLALVAGE AAGIMENISD
              730 740 750 760
DVIVGRCLAI LKGIFGSSAV PQPKETVVSR WRADPWARGS
              770 780 790 800
YSYVAAGSSG NDYDLMAQPI TPGPSIPGAP QPIPRLFFAG
              810 820 830 840
EHTIRNYPAT VHGALLSGLR EAGRIADQFL GAMYTLPRQA
              850 852
TPGVPAQQSP SM.
```

[0369] The invention also includes other isoforms of LSD1, including Isoform 2, provided as UniProt accession number 060341-2.

[0370] Examples of nucleic acid sequences encoding LSD1 are provided below. There are 2 identified isoforms of human LSD1. The mRNA sequences are provided below (In embodiments, in each sequence, T may be replaced with U). In embodiments, LSD1 includes the proteins encoded by each of the sequences below:

| Gene ID | Variant | Sequence |
|---|---|---|
| KDM1A/LSD1/AOF2; | Isoform A; NCBI Reference | GGCGCGGCGGGAGCGCGCTTGGCGCGTGCGTACGCG |
| Gene ID: 23028 | Sequence: NM_001009999.2 | ACGGCGGTTGGCGGCGCGCGGGCAGCGTGAAGCG |
| SEQ ID NO: 41 | | AGGCGAGGCAAGGCTTTTCGGACCCACGGAGCGACA |
| | | GAGCGAGCGGCCCCTACGGCCGTCGGCGGCCCGG |
| | | CGGCCCGAGATGTTATCTGGGAAGAAGGCGGCAGCC |
| | | GCGGCGGCGGCGGCTGCAGCGGCAGCAACCGGGA |
| | | CGGAGGCTGGCCCTGGGACAGCAGGCGGCTCCGAGA |
| | | ACGGGTCTGAGGTGGCCGCGCAGCCCGCGGGCCT |
| | | GTCGGGCCCAGCCGAGGTCGGGCCGGGGGCGGTGG |
| | | GGGAGCGCACACCCCGCAAGAAAGAGCCTCCGCGG |
| | | GCCTCGCCCCCCGGGGGCCTGGCGGAACCGCCGGGG |
| | | TCCGCAGGGCCTCAGGCCGGCCCTACTGTCGTGC |
| | | CTGGGTCTGCGACCCCCATGGAAACTGGAATAGCAGA |
| | | GACTCCGGAGGGGCGTCGGACCAGCCGGCGCAA |
| | | GCGGGCGAAGGTAGAGTACAGAGAGATGGATGAAA |
| | | GCTTGGCCAACCTCTCAGAAGATGAGTATTATTCA |
| | | GAAGAAGAGAGAAATGCCAAAGCAGAGAAGGAAAA |
| | | GAAGCTTCCCCCACCACCCCCTCAAGCCCCACCTG |
| | | AGGAAGAAAATGAAAGTGAGCCTGAAGAACCATCGG |
| | | GGCAAGCAGGAGGACTTCAAGACGACAGTTCTGG |
| | | AGGGTATGGAGACGGCCAAGCATCAGGTGTGGAGGG |
| | | CGCAGCTTTCCAGAGCCGACTTCCTCATGACCGG |
| | | ATGACTTCTCAAGAAGCAGCCTGTTTTCCAGATATTAT |
| | | CAGTGGACCACAACAGACCCAGAAGGTTTTTC |
| | | TTTTCATTAGAAACCGCACACTGCAGTTGTGGTTGGAT |
| | | AATCCAAAGATTCAGCTGACATTTGAGGCTAC |
| | | TCTCCAACAATTAGAAGCACCTTATAACAGTGATACTG |
| | | TGCTTGTCCACCGAGTTCACAGTTATTTAGAG |
| | | CGTCATGGTCTTATCAACTTCGGCATCTATAAGAGGAT |
| | | AAAACCCCTACCAACTAAAAAGACAGGAAAGG |
| | | TAATTATTATAGGCTCTGGGGTCTCAGGCTTGGCAGC |
| | | AGCTCGACAGTTACAAAGTTTTGGAATGGATGT |
| | | CACACTTTTGGAAGCCAGGGATCGTGTGGGTGGACGA |
| | | GTTGCCACATTTCGCAAAGGAAACTATGTAGCT |
| | | GATCTTGGAGCCATGGTGGTAACAGGTCTTGGAGGG |
| | | AATCCTATGGCTGTGGTCAGCAAACAAGTAAATA |
| | | TGGAACTGGCCAAGATCAAGCAAAAATGCCCACTTTA |
| | | TGAAGCCAACGGACAAGCTGACACTGTCAAGGT |
| | | TCCTAAAGAGAAAGATGAAATGGTAGAGCAAGAGTTT |
| | | AACCGGTTGCTAGAAGCTACATCTTACCTTAGT |
| | | CATCAACTAGACTTCAATGTCCTCAATAATAAGCCTGT |
| | | GTCCCTTGGCCAGGCATTGGAAGTTGTCATTC |
| | | AGTTACAAGAGAAGCATGTCAAAGATGAGCAGATTGA |
| | | ACATTGGAAGAAGATAGTGAAAACTCAGGAAGA |
| | | ATTGAAAGAACTTCTTAATAAGATGGTAAATTTGAAA |
| | | GAGAAAATTAAAGAACTCCATCAGCAATACAAA |
| | | GAAGCATCTGAAGTAAAGCCACCCAGAGATATTACTG |
| | | CCGAGTTCTTAGTGAAAAGCAAACACAGGGATC |
| | | TGACCGCCCTATGCAAGGAATATGATGAATTAGCTGA |
| | | AACACAAGGAAAGCTAGAAGAAAAACTTCAGGA |
| | | GTTGGAAGCGAATCCCCCAAGTGATGTATATCTCTCAT |
| | | CAAGAGACAGACAAATACTTGATTGGCATTTT |
| | | GCAAATCTTGAATTTGCTAATGCCACACCTCTCTCAACT |
| | | CTCTCCCTTAAGCACTGGGATCAGGATGATG |
| | | ACTTTGAGTTCACTGGCAGCCACCTGACAGTAAGGAA |
| | | TGGCTACTCGTGTGTGCCTGTGGCTTTAGCAGA |
| | | AGGCCTAGACATTAAACTGAATACAGCAGTGCGACAG |
| | | GTTCGCTACACGGCTTCAGGATGTGAAGTGATA |
| | | GCTGTGAATACCCGCTCCACGAGTCAAACCTTTATTTA |
| | | TAAATGCGACGCAGTTCTCTGTACCCTTCCCC |
| | | TGGGTGTGCTGAAGCAGCAGCCACCAGCCGTTCAGTT |
| | | TGTGCCACCTCTCCCTGAGTGGAAAACATCTGC |
| | | AGTCCAAAGGATGGGATTTGGCAACCTTAACAAGGTG |
| | | GTGTTGTGTTTTGATCGGGTGTTCTGGGATCCA |
| | | AGTGTCAATTTGTTCGGGCATGTTGGCAGTACGACTG |
| | | CCAGCAGGGGTGAGCTCTTCCTCTTCTGGAACC |
| | | TCTATAAAGCTCCAATACTGTTGGCACTAGTGGCAGG |
| | | AGAAGCTGCTGGTATCATGGAAAACATAAGTGA |
| | | CGATGTGATTGTTGGCCGATGCCTGGCCATTCTCAAA |
| | | GGGATTTTTGGTAGCAGTGCAGTACCTCAGCCC |
| | | AAAGAAACTGTGGTGTCTCGTTGGCGTGCTGATCCCT |
| | | GGGCTCGGGGCTCTTATTCCTATGTTGCTGCAG |
| | | GATCATCTGGAAATGACTATGATTTAATGGCTCAGCCA |
| | | ATCACTCCTGGCCCCTCGATTCCAGGTGCCCC |
| | | ACAGCCGATTCCACGACTCTTCTTTGCGGGAGAACATA |
| | | CGATCCGTAACTACCCAGCCACAGTGCATGGT |
| | | GCTCTGCTGAGTGGGCTGCGAGAAGCGGGAAGAATT |
| | | GCAGACCAGTTTTTGGGGGCCATGTATACGCTGC |
| | | CTCGCCAGGCCACACCAGGTGTTCCTGCACAGCAGTC |
| | | CCCAAGCATGTGAGACAGATGCATTCTAAGGGA |
| | | AGAGGCCCATGTGCCTGTTTCTGCCATGTAAGGAAGG |
| | | CTCTTCTAGCAATACTAGATCCCACTGAGAAAA |
| | | TCCACCCTGGCATCTGGGCTCCTGATCAGCTGATGGA |
| | | GCTCCTGATTTGACAAAGGAGCTTGCCTCCTTT |
| | | GAATGACCTAGAGCACAGGGAGGAACTTGTCCATTAG |
| | | TTTGGAATTGTGTTCTTCGTAAAGACTGAGGCA |
| | | AGCAAGTGCTGTGAAATAACATCATCTTAGTCCCTTGG |
| | | TGTGTGGGGTTTTTGTTTTTTTTTTATATTTT |
| | | GAGAATAAAACTTCATATAAAATTGGCAAAAAAAAAA |
| | | AAAAAAAA |
| KDM1A/LSD1/AOF2; | Isoform B; NCBI Reference | GGCGCGGCGGGAGCGCGCTTGGCGCGTGCGTACGCG |
| Gene ID: 23028 | Sequence: NM_015013.3 | ACGGCGGTTGGCGGCGCGCGGGCAGCGTGAAGCG |
| SEQ ID NO: 42 | | AGGCGAGGCAAGGCTTTTCGGACCCACGGAGCGACA |
| | | GAGCGAGCGGCCCCTACGGCCGTCGGCGGCCCGG |
| | | CGGCCCGAGATGTTATCTGGGAAGAAGGCGGCAGCC |
| | | GCGGCGGCGGCGGCTGCAGCGGCAGCAACCGGGA |
| | | CGGAGGCTGGCCCTGGGACAGCAGGCGGCTCCGAGA |
| | | ACGGGTCTGAGGTGGCCGCGCAGCCCGCGGGCCT |
| | | GTCGGGCCCAGCCGAGGTCGGGCCGGGGGCGGTGG |
| | | GGGAGCGCACACCCCGCAAGAAAGAGCCTCCGCGG |
| | | GCCTCGCCCCCCGGGGGCCTGGCGGAACCGCCGGGG |
| | | TCCGCAGGGCCTCAGGCCGGCCCTACTGTCGTGC |
| | | CTGGGTCTGCGACCCCCATGGAAACTGGAATAGCAGA |
| | | GACTCCGGAGGGGCGTCGGACCAGCCGGCGCAA |
| | | GCGGGCGAAGGTAGAGTACAGAGAGATGGATGAAA |
| | | GCTTGGCCAACCTCTCAGAAGATGAGTATTATTCA |
| | | GAAGAAGAGAGAAATGCCAAAGCAGAGAAGGAAAA |
| | | GAAGCTTCCCCCACCACCCCCTCAAGCCCCACCTG |
| | | AGGAAGAAAATGAAAGTGAGCCTGAAGAACCATCGG |
| | | GTGTGGAGGGCGCAGCTTTCCAGAGCCGACTTCC |
| | | TCATGACCGGATGACTTCTCAAGAAGCAGCCTGTTTTC |
| | | CAGATATTATCAGTGGACCACAACAGACCCAG |
| | | AAGGTTTTTCTTTTCATTAGAAACCGCACACTGCAGTT |
| | | GTGGTTGGATAATCCAAAGATTCAGCTGACAT |
| | | TTGAGGCTACTCTCCAACAATTAGAAGCACCTTATAAC |
| | | AGTGATACTGTGCTTGTCCACCGAGTTCACAG |
| | | TTATTTAGAGCGTCATGGTCTTATCAACTTCGGCATCT |
| | | ATAAGAGGATAAAACCCCTACCAACTAAAAAG |
| | | ACAGGAAAGGTAATTATTATAGGCTCTGGGGTCTCAG |
| | | GCTTGGCAGCAGCTCGACAGTTACAAAGTTTTG |
| | | GAATGGATGTCACACTTTTGGAAGCCAGGGATCGTGT |
| | | GGGTGGACGAGTTGCCACATTTCGCAAAGGAAA |
| | | CTATGTAGCTGATCTTGGAGCCATGGTGGTAACAGGT |
| | | CTTGGAGGGAATCCTATGGCTGTGGTCAGCAAA |
| | | CAAGTAAATATGGAACTGGCCAAGATCAAGCAAAAAT |
| | | GCCCACTTTATGAAGCCAACGGACAAGCTGTTC |
| | | CTAAAGAGAAAGATGAAATGGTAGAGCAAGAGTTTA |
| | | ACCGGTTGCTAGAAGCTACATCTTACCTTAGTCA |
| | | TCAACTAGACTTCAATGTCCTCAATAATAAGCCTGTGT |
| | | CCCTTGGCCAGGCATTGGAAGTTGTCATTCAG |
| | | TTACAAGAGAAGCATGTCAAAGATGAGCAGATTGAAC |
| | | ATTGGAAGAAGATAGTGAAAACTCAGGAAGAAT |
| | | TGAAAGAACTTCTTAATAAGATGGTAAATTTGAAAGA |
| | | GAAAATTAAAGAACTCCATCAGCAATACAAAGA |
| | | AGCATCTGAAGTAAAGCCACCCAGAGATATTACTGCC |
| | | GAGTTCTTAGTGAAAAGCAAACACAGGGATCTG |
| | | ACCGCCCTATGCAAGGAATATGATGAATTAGCTGAAA |
| | | CACAAGGAAAGCTAGAAGAAAAACTTCAGGAGT |
| | | TGGAAGCGAATCCCCCAAGTGATGTATATCTCTCATCA |
| | | AGAGACAGACAAATACTTGATTGGCATTTTGC |
| | | AAATCTTGAATTTGCTAATGCCACACCTCTCTCAACTCT |
| | | CTCCCTTAAGCACTGGGATCAGGATGATGAC |
| | | TTTGAGTTCACTGGCAGCCACCTGACAGTAAGGAATG |
| | | GCTACTCGTGTGTGCCTGTGGCTTTAGCAGAAG |
| | | GCCTAGACATTAAACTGAATACAGCAGTGCGACAGGT |
| | | TCGCTACACGGCTTCAGGATGTGAAGTGATAGC |
| | | TGTGAATACCCGCTCCACGAGTCAAACCTTTATTTATA |
| | | AATGCGACGCAGTTCTCTGTACCCTTCCCCTG |
| | | GGTGTGCTGAAGCAGCAGCCACCAGCCGTTCAGTTTG |
| | | TGCCACCTCTCCCTGAGTGGAAAACATCTGCAG |
| | | TCCAAAGGATGGGATTTGGCAACCTTAACAAGGTGGT |
| | | GTTGTGTTTTGATCGGGTGTTCTGGGATCCAAG |
| | | TGTCAATTTGTTCGGGCATGTTGGCAGTACGACTGCCA |
| | | GCAGGGGTGAGCTCTTCCTCTTCTGGAACCTC |
| | | TATAAAGCTCCAATACTGTTGGCACTAGTGGCAGGAG |
| | | AAGCTGCTGGTATCATGGAAAACATAAGTGACG |
| | | ATGTGATTGTTGGCCGATGCCTGGCCATTCTCAAAGG |
| | | GATTTTTGGTAGCAGTGCAGTACCTCAGCCCAA |
| | | AGAAACTGTGGTGTCTCGTTGGCGTGCTGATCCCTGG |
| | | GCTCGGGGCTCTTATTCCTATGTTGCTGCAGGA |
| | | TCATCTGGAAATGACTATGATTTAATGGCTCAGCCAAT |
| | | CACTCCTGGCCCCTCGATTCCAGGTGCCCCAC |
| | | AGCCGATTCCACGACTCTTCTTTGCGGGAGAACATACG |
| | | ATCCGTAACTACCCAGCCACAGTGCATGGTGC |
| | | TCTGCTGAGTGGGCTGCGAGAAGCGGGAAGAATTGC |
| | | AGACCAGTTTTTGGGGGCCATGTATACGCTGCCT |
| | | CGCCAGGCCACACCAGGTGTTCCTGCACAGCAGTCCC |
| | | CAAGCATGTGAGACAGATGCATTCTAAGGGAAG |
| | | AGGCCCATGTGCCTGTTTCTGCCATGTAAGGAAGGCT |
| | | CTTCTAGCAATACTAGATCCCACTGAGAAAATC |
| | | CACCCTGGCATCTGGGCTCCTGATCAGCTGATGGAGC |
| | | TCCTGATTTGACAAAGGAGCTTGCCTCCTTTGA |
| | | ATGACCTAGAGCACAGGGAGGAACTTGTCCATTAGTT |
| | | TGGAATTGTGTTCTTCGTAAAGACTGAGGCAAG |
| | | CAAGTGCTGTGAAATAACATCATCTTAGTCCCTTGGTG |
| | | TGTGGGGTTTTTGTTTTTTTTTTATATTTTGA |
| | | GAATAAAACTTCATATAAAATTGGCAAAAAAAAAAAA |
| | | AAAAAA |

[0371] “LSD1 inhibitor” as the term is used herein, refers to a molecule, or a group of molecules (e.g., a system) that reduces or eliminates the function and/or expression of LSD1. In embodiments, an LSD1 inhibitor is a molecule that inhibits the expression of LSD1 e.g., reduces or eliminates expression of LSD1. In embodiments, the LSD1 inhibitor is a molecule that inhibits the function of LSD1. An example of an LSD1 inhibitor that inhibits the expression of LSD1 is a gene editing system, e.g., as described herein, that is targeted to nucleic acid within the LSD1 gene (e.g., within the KDM1A gene), or its regulatory elements, such that modification of the nucleic acid at or near the gene editing system binding site(s) is modified to reduce or eliminate expression of LSD1. Another example of an LSD1 inhibitor that inhibits the expression of LSD1 is a nucleic acid molecule, e.g., RNA molecule, e.g., a short hairpin RNA (shRNA) or short interfering RNA (siRNA), capable of hybridizing with LSD1 mRNA and causing a reduction or elimination of LSD1 translation. Another example of an LSD1 inhibitor that inhibits the expression of LSD1 is an antisense oligonucleotide. LSD1 inhibitors also include nucleic acids encoding molecules which inhibit LSD1 expression (e.g., nucleic acid encoding an anti-LSD1 shRNA or siRNA, or nucleic acid encoding one or more, e.g., all, components of an anti-LSD1 gene editing system). An example of a molecule that inhibits the function of LSD1 is a molecule, e.g., a protein or small molecule which inhibits one or more activities of LSD1. An example is a small molecule inhibitor of LSD1, e.g., as described herein. In an exemplary embodiment, a small molecule LSD1 inhibitor is a reversible LSD1 inhibitor. In another exemplary embodiment, a small molecule LSD1 inhibitor is an irreversible LSD1 inhibitor. A small molecule LSD1 inhibitor may bind LSD1 at the catalytic site or at a site other than the catalytic site. Another example is a dominant negative LSD1 protein. Another example is an anti-LSD1 antibody or antigen-binding fragment thereof. Another example is a molecule, e.g., a small molecule, which inhibits an LSD1 binding partner. LSD1 inhibitors also include nucleic acids encoding inhibitors of LSD1 function. Further description of LSD1 inhibitors is provided below in the section titled “LSD1 inhibitors.”

[0372] A “binding partner” as the term is used herein in the context of an LSD1 binding partner, refers to a molecule, e.g., a protein, which interacts, e.g., binds to, LSD1 protein. Without being bound by theory, it is believed that LSD1 binds to one or more HDAC proteins, e.g., HDAC1. Such HDAC proteins are considered examples of LSD1 binding partners. Other LSD1 binding partners include, for example, proteins of the Co-REST/REST complex, e.g., HDAC1, HDAC2, p40, p80, Co-REST and ZNF217 (Lee, M. G., Wynder, C., Cooch, N. & Shiekhattar, R. An essential role for CoREST in nucleosomal histone 3 lysine 4 demethylation. Nature 437, 432-435 (2005)); proteins of the Blimp1 complex (Mol Cell Biol. 2009 March; 29(6):1421-31. doi: 10.1128/MCB.01158-08. Epub 2009 Jan. 5); proteins of the NuRD complex (Cell. 2009 Aug. 21; 138(4):660-72. doi: 10.1016/j.cell.2009.05.050); and the androgen receptor (Nature. 2005 Sep. 15; 437(7057):436-9. Epub 2005 Aug. 3).

[0373] A “system” as the term is used herein in connection with, for example, gene editing, refers to a group of molecules, e.g., one or more molecules, which together act to produce a desired function.

[0374] A “gene editing system” as the term is used herein, refers to a system, e.g., one or more molecules, that direct and effect an alteration, e.g., a deletion, of one or more nucleic acids at or near a site of genomic DNA targeted by said system. Gene editing systems are known in the art, and are described more fully below.

[0375] A “dominant negative” gene product or protein is one that interferes with the function of a gene product or protein. The gene product affected can be the same or different from the dominant negative protein. Dominant negative gene products can be of many forms, including truncations, full length proteins with point mutations or fragments thereof, or fusions of full length wild type or mutant proteins or fragments thereof with other proteins. The level of inhibition observed can be very low. For example, it may require a large excess of the dominant negative protein compared to the functional protein or proteins involved in a process in order to see an effect. It may be difficult to see effects under normal biological assay conditions. In one embodiment, a dominant negative LSD1 is a catalytically inactive LSD1.

[0376] The term “proportion” refers to the ratio of the specified molecule to the total number of molecules in a population. In an exemplary embodiment, a proportion of T cells having a specific phenotype (e.g., T_{SCM} cells) refers to the ratio of the number of T cells having that phenotype relative to the total number of T cells in a population. In an exemplary embodiment, a proportion of T cells having a specific phenotype (e.g., CD45RA+CD62L+ cells) refers to the ratio of the number of T cells having that phenotype relative to the total number of T cells in a population. It will be understood that such proportions may be measured against certain subsets of cells, where indicted. For example, the proportion of CD4+ T_{SCM} cells may be measured against the total number of CD4+ T cells.

[0377] The term “population of immune effector cells” as used herein refers to a composition comprising at least two, e.g., two or more, e.g., more than one, immune effector cell, and does not denote any level of purity or the presence or absence of other cell types. In an exemplary embodiment, the population is substantially free of other cell types. In another exemplary embodiment, the population comprises at least two cells of the specified cell type, or having the specified function or property.

[0378] The terms “T_{SCM}-like cell,” “naive T Cell” and “naïve T cell” are used interchangeably and refer to a less differentiated T cell state, that is characterized by surface expression of CD45RA and CD62L (e.g., is CD45RA positive and CD62L positive (sometimes written as CD45RA+CD62L+)). In general, T cell differentiation proceeds, from most “naive” to most “exhausted,” T_{SCM}-like (e.g., a CD45RA+CD62L+ cell) >T_{CM} (e.g., a CD45RA−CD62L+ cell)>T_{EM} (e.g., a CD45RA−CD62L− cell)>T_{EFF}. Naive T cells may be characterized, for example, as having increased self-renewal, anti-tumor efficacy, proliferation and/or survival, relative to a more exhausted T cell phenotype. In an exemplary embodiment, a naive T cell refers to a CD45RA+CD62L+ T cell. In another exemplary embodiment, a naive T cell refers to a T_{SCM} cell, e.g., a CD45RA+CD62L+CCR7+CD27+CD95+ T cell.

[0379] The term “T_{SCM}” refers to a T cell having a stem cell memory phenotype, characterized in that it expresses CD45RA, CD62L, CCR7, CD27 and CD95 on its cell surface (e.g., is CD45RA positive, CD62L positive, CCR7 positive, CD27 positive and CD95 positive (sometimes written as CD45RA+CD62L+CCR7+CD27+CD95+)). A T_{SCM} cell is an example of a naive T cell. The T cell may be CD4+ and/or CD8+ T cell.

[0380] Ranges: throughout this disclosure, various aspects of the invention can be presented in a range format. It should be understood that the description in range format is merely for convenience and brevity and should not be construed as an inflexible limitation on the scope of the invention. Accordingly, the description of a range should be considered to have specifically disclosed all the possible subranges as well as individual numerical values within that range. For example, description of a range such as from 1 to 6 should be considered to have specifically disclosed subranges such as from 1 to 3, from 1 to 4, from 1 to 5, from 2 to 4, from 2 to 6, from 3 to 6 etc., as well as individual numbers within that range, for example, 1, 2, 2.7, 3, 4, 5, 5.3, and 6. As another example, a range such as 95-99% identity, includes something with 95%, 96%, 97%, 98% or 99% identity, and includes subranges such as 96-99%, 96-98%, 96-97%, 97-99%, 97-98% and 98-99% identity. This applies regardless of the breadth of the range.

[0381] Headings, sub-headings or numbered or lettered elements, e.g., (a), (b), (i) etc, are presented merely for ease of reading. The use of headings or numbered or lettered elements in this document does not require the steps or elements be performed in alphabetical order or that the steps or elements are necessarily discrete from one another.

[0382] All publications, patent applications, patents, and other references mentioned herein are incorporated by reference in their entirety.

[0383] Other features, objects, and advantages of the invention will be apparent from the description and drawings, and from the claims.

### LSD1 Inhibitors

[0384] Any molecule that inhibits LSD1 may be useful in the aspects of the invention described herein, e.g., in connection with the cells, compositions and methods disclosed herein. The following sections provide exemplary LSD1 inhibitors, and are not intended to be limiting.

[0385] In embodiments, the LSD1 inhibitor is a molecule or system that results in increased or prolonged proliferation or persistence of CAR-expressing cells with a naive phenotype (e.g., T_{SCM} cells), e.g., in culture or in a subject, e.g., as compared to non-treated CAR-expressing cells or a non-treated subject. In embodiments, increased proliferation or persistence is associated with in an increase in the number of CAR-expressing cells. Methods for measuring increased or prolonged proliferation are described in Example 4. In another embodiment, administration or contacting with an LSD1 inhibitor results in increased cytokine release or increased killing of cancer cells by CAR-expressing cells, e.g., in culture or in a subject, e.g., as compared to non-treated CAR-expressing cells or a non-treated subject. Methods for measuring increased cytokine release are described in, e.g., Example 4. In embodiments, increased killing of cancer cells is associated with in a decrease in tumor volume. Methods for measuring increased killing of cancer cells are described in Example 4 and, e.g., in International Application WO2014/153270, which is herein incorporated by reference in its entirety.

### Nucleic Acid Inhibitors

[0386] In one aspect the LSD1 inhibitor is a nucleic acid molecule. In embodiments, the nucleic acid is a DNA molecule, e.g., an antisense oligonucleotide (e.g., Watts et al., J. Pathol., 2012, 226(2), pp. 365-379). In an embodiment, the antisense oligonucleotide is complementary to an LSD1 mRNA or pre-mRNA molecule. In another aspect, the LSD1 inhibitor includes nucleic acid encoding said antisense oligonucleotide.

[0387] In embodiments, the nucleic acid LSD1 inhibitor is an interfering RNA molecule, e.g., a shRNA or siRNA, that inhibits expression, e.g., translation, of LSD1. In another aspect, the LSD1 inhibitor includes nucleic acid encoding said interfering RNA molecule. In embodiments, the interfering RNA molecule, e.g., a shRNA or siRNA, that inhibits expression, e.g., translation, of LSD1 comprises a domain complementary to a sequence of an LSD1 mRNA (such sequence referred to herein in relation to an interfering RNA molecule, e.g., a shRNA or siRNA, as a “target sequence”). Examples of such target sequences are provided in Table 1.

[0388] Exemplary Target Sequences for shRNA and siRNA LSD1 inhibitors, and exemplary nucleic acids encoding shRNA LSD1 inhibitors are provided in Table 1 below,

TABLE 1

| | | | SEQ | | |
|---|---|---|---|---|---|
| | | | ID | | SEQ ID |
| TARGET | SHRNA_NAME | Target Sequence | NO: | Sequence encoding anti-LSD1 shRNA | NO: |
| AOF2 | KDM1A-917_58263 | CCGAGTTCACAGTTATTT | 43 | CCGAGTTCACAGTTATTTAGACTCGAGTCTA | 83 |
| | | AGA | | AATAACTGTGAACTCGGTTTTTTGAATTCGCA | |
| | | | | CCAGCACGCTACGCAACACGTTGACGTTGAC | |
| | | | | CACATGTTCGCCGTCTTC | |
| AOF2 | KDM1A-1265_58264 | CGGACAAGCTGTTCCTAA | 44 | CGGACAAGCTGTTCCTAAAGACTCGAGTCTT | 84 |
| | | AGA | | TAGGAACAGCTTGTCCGTTTTTTGAATTCGCA | |
| | | | | CCAGCACGCTACGCAGTCAGTTGACGTTGAC | |
| | | | | CAACGTTTCGCCGTCTTC | |
| AOF2 | KDM1A-2928_58265 | GAATTGTGTTCTTCGTAA | 45 | GAATTGTGTTCTTCGTAAAGACTCGAGTCTTT | 85 |
| | | AGA | | ACGAAGAACACAATTCTTTTTTGAATTCGCAC | |
| | | | | CAGCACGCTACGCATGACGTTGACGTTGACC | |
| | | | | AACCATTCGCCGTCTTC | |
| AOF2 | KDM1A-914_58266 | CCACCGAGTTCACAGTTA | 46 | CCACCGAGTTCACAGTTATTTCTCGAGAAAT | 86 |
| | | TTT | | AACTGTGAACTCGGTGGTTTTTTGAATTCGC | |
| | | | | ACCAGCACGCTACGCAACGTGTTGACGTTGA | |
| | | | | CCAACACTTCGCCGTCTTC | |
| AOF2 | KDM1A-1000_58267 | CAGGAAAGGTAATTATT | 47 | CAGGAAAGGTAATTATTATAGCTCGAGCTAT | 87 |
| | | ATAG | | AATAATTACCTTTCCTGTTTTTTGAATTCGCAC | |
| | | | | CAGCACGCTACGCACATGGTTGACGTTGACC | |
| | | | | AACTGTTCGCCGTCTTC | |
| AOF2 | KDM1A-2759_58268 | GCCTGTTTCTGCCATGTA | 48 | GCCTGTTTCTGCCATGTAAGGCTCGAGCCTT | 88 |
| | | AGG | | ACATGGCAGAAACAGGCTTTTTTGAATTCGC | |
| | | | | ACCAGCACGCTACGCATGACGTTGACGTTGA | |
| | | | | CCATGGTTTCGCCGTCTTC | |
| AOF2 | KDM1A-998_58269 | GACAGGAAAGGTAATTA | 49 | GACAGGAAAGGTAATTATTATCTCGAGATAA | 89 |
| | | TTAT | | TAATTACCTTTCCTGTCTTTTTTGAATTCGCAC | |
| | | | | CAGCACGCTACGCAACTGGTTGACGTTGACC | |
| | | | | ATGCATTCGCCGTCTTC | |
| AOF2 | KDM1A-1271_58270 | AGCTGTTCCTAAAGAGA | 50 | AGCTGTTCCTAAAGAGAAAGACTCGAGTCTT | 90 |
| | | AAGA | | TCTCTTTAGGAACAGCTTTTTTTGAATTCGCA | |
| | | | | CCAGCACGCTACGCACACAGTTGACGTTGAC | |
| | | | | CATGACTTCGCCGTCTTC | |
| AOF2 | KDM1A-1996_58271 | CGAGTCAAACCTTTATTT | 51 | CGAGTCAAACCTTTATTTATACTCGAGTATAA | 91 |
| | | ATA | | ATAAAGGTTTGACTCGTTTTTTGAATTCGCAC | |
| | | | | CAGCACGCTACGCAGTGTGTTGACGTTGACC | |
| | | | | ATGTGTTCGCCGTCTTC | |
| AOF2 | KDM1A-863_58272 | GGCTACTCTCCAACAATT | 52 | GGCTACTCTCCAACAATTAGACTCGAGTCTA | 92 |
| | | AGA | | ATTGTTGGAGAGTAGCCTTTTTTGAATTCGC | |
| | | | | ACCAGCACGCTACGCAGTACGTTGACGTTGA | |
| | | | | CACGTGTTTCGCCGTCTTC | |
| AOF2 | KDM1A-1044_58273 | GCAGCTCGACAGTTACA | 53 | GCAGCTCGACAGTTACAAAGTCTCGAGACTT | 93 |
| | | AAGT | | TGTAACTGTCGAGCTGCTTTTTTGAATTCGCA | |
| | | | | CCAGCACGCTACGCATGTGGTTGACGTTGAC | |
| | | | | ACGTCATTCGCCGTCTTC | |
| AOF2 | KDM1A-1903_58274 | CAGAAGGCCTAGACATT | 54 | CAGAAGGCCTAGACATTAAACCTCGAGGTTT | 94 |
| | | AAAC | | AATGTCTAGGCCTTCTGTTTTTTGAATTCGCA | |
| | | | | CCAGCACGCTACGCAACCAGTTGACGTTGAC | |
| | | | | ACGTACTTCGCCGTCTTC | |
| AOF2 | KDM1A-563_58275 | AGATGAGTATTATTCAGA | 55 | AGATGAGTATTATTCAGAAGACTCGAGTCTT | 95 |
| | | AGA | | CTGAATAATACTCATCTTTTTTTGAATTCGCA | |
| | | | | CCAGCACGCTACGCACAGTGTTGACGTTGAC | |
| | | | | ACGTTGTTCGCCGTCTTC | |
| AOF2 | KDM1A-876_58276 | CAATTAGAAGCACCTTAT | 56 | CAATTAGAAGCACCTTATAACCTCGAGGTTA | 96 |
| | | AAC | | TAAGGTGCTTCTAATTGTTTTTTGAATTCGCA | |
| | | | | CCAGCACGCTACGCATGTGGTTGACGTTGAC | |
| | | | | ACCAGTTTCGCCGTCTTC | |
| AOF2 | KDM1A-2908_58277 | GGAACTTGTCCATTAGTT | 57 | GGAACTTGTCCATTAGTTTGGCTCGAGCCAA | 97 |
| | | TGG | | ACTAATGGACAAGTTCCTTTTTTGAATTCGCA | |
| | | | | CCAGCACGCTACGCAACGTGTTGACGTTGAC | |
| | | | | ACCACATTCGCCGTCTTC | |
| AOF2 | KDM1A-885_58278 | GCACCTTATAACAGTGAT | 58 | GCACCTTATAACAGTGATACTCTCGAGAGTA | 98 |
| | | ACT | | TCACTGTTATAAGGTGCTTTTTTGAATTCGCA | |
| | | | | CCAGCACGCTACGCACAACGTTGACGTTGAC | |
| | | | | ACCAACTTCGCCGTCTTC | |
| AOF2 | KDM1A-960_58279 | GGCATCTATAAGAGGAT | 59 | GGCATCTATAAGAGGATAAAACTCGAGTTTT | 99 |
| | | AAAA | | ATCCTCTTATAGATGCCTTTTTTGAATTCGCA | |
| | | | | CCAGCACGCTACGCAGTCAGTTGACGTTGAC | |
| | | | | ACCATGTTCGCCGTCTTC | |
| AOF2 | KDM1A-1399_58280 | CATTGGAAGTTGTCATTC | 60 | CATTGGAAGTTGTCATTCAGTCTCGAGACTG | 100 |
| | | AGT | | AATGACAACTTCCAATGTTTTTTGAATTCGCA | |
| | | | | CCAGCACGCTACGCAACGTGTTGACGTTGAC | |
| | | | | ACACGTTTCGCCGTCTTC | |
| AOF2 | KDM1A-2474_58281 | TGGAAATGACTATGATTT | 61 | TGGAAATGACTATGATTTAATCTCGAGATTA | 101 |
| | | AAT | | AATCATAGTCATTTCCATTTTTTGAATTCGCA | |
| | | | | CCAGCACGCTACGCACACAGTTGACGTTGAC | |
| | | | | ACACCATTCGCCGTCTTC | |
| AOF2 | KDM1A_NM_015013.3_21174 | CGGTTGCTAGAAGCTAC | 62 | GAAGACGCACCGGCGGTTGCTAGAAGTTAC | 102 |
| | | ATCT | | ATTTGTTAATATTCATAGCAGATGTAGCTTCT | |
| | | | | AGCAACCGTTTTTTGAATTCGCACCAGCACG | |
| | | | | CTACGCAACGTGTCACAGTACACTGCAACTT | |
| | | | | CGCCGT | |
| AOF2 | KDM1A_NM_015013.3_21173 | GCCACATTTCGCAAAGG | 63 | GAAGACGCACCGGGCCACATTTCGTAAAGG | 103 |
| | | AAAC | | AAATGTTAATATTCATAGCGTTTCCTTTGCGA | |
| | | | | AATGTGGCTTTTTTGAATTCGCACCAGCACG | |
| | | | | CTACGCATGACGTCACAGTACACTGCACATT | |
| | | | | CGCCGT | |
| AOF2 | KDM1A_NM_015013.3_21172 | CCTCATGACCGGATGACT | 64 | GAAGACGCACCGGCCTCATGACTGGATGATT | 104 |
| | | TCT | | TCTGTTAATATTCATAGCAGAAGTCATCCGGT | |
| | | | | CATGAGGTTTTTTGAATTCGCACCAGCACGC | |
| | | | | TACGCAGTCAGTCACAGTACACTGCAGTTTC | |
| | | | | GCCGT | |
| AOF2 | KDM1A_NM_015013.3_21171 | CGAGTTGCCACATTTCGC | 65 | GAAGACGCACCGGCGAGTTGCCATATTTCGT | 105 |
| | | AAA | | AAAGTTAATATTCATAGCTTTGCGAAATGTG | |
| | | | | GCAACTCGTTTTTTGAATTCGCACCAGCACGC | |
| | | | | TACGCAACACGTCACAGTACACTGGTTGTTC | |
| | | | | GCCGT | |
| AOF2 | KDM1A_NM_015013.3_21170 | CGTCATGGTCTTATCAAC | 66 | GAAGACGCACCGGCGTCATGGTCTTATCAAT | 106 |
| | | TTC | | TTCGTTAATATTCATAGCGAAGTTGATAAGA | |
| | | | | CCATGACGTTTTTTGAATTCGCACCAGCACGC | |
| | | | | TACGCATGTGGTCACAGTACACTGGTACTTC | |
| | | | | GCCGT | |
| AOF2 | KDM1A_NM_015013.3_21169 | GAGCGTCATGGTCTTATC | 67 | GAAGACGCACCGGGAGCGTTATGGTCTTATT | 107 |
| | | AAC | | AACGTTAATATTCATAGCGTTGATAAGACCA | |
| | | | | TGACGCTCTTTTTTGAATTCGCACCAGCACGC | |
| | | | | TACGCAGTCAGTCACAGTACACTGGTCATTC | |
| | | | | GCCGT | |
| AOF2 | KDM1A_NM_015013.3_21168 | CCGGATGACTTCTCAAGA | 68 | GAAGACGCACCGGCCGGATGACTTCTTAAG | 108 |
| | | AGC | | AAGTGTTAATATTCATAGCGCTTCTTGAGAA | |
| | | | | GTCATCCGGTTTTTTGAATTCGCACCAGCACG | |
| | | | | CTACGCACAGTGTCACAGTACACTGGTGTTT | |
| | | | | CGCCGT | |
| AOF2 | KDM1A_NM_015013.3_21167 | CACAGGGAGGAACTTGT | 69 | GAAGACGCACCGGCACAGGGAGGAATTTGT | 109 |
| | | CCAT | | CTATGTTAATATTCATAGCATGGACAAGTTCC | |
| | | | | TCCCTGTGTTTTTTGAATTCGCACCAGCACGC | |
| | | | | TACGCAGTACGTCACAGTACACACTGTGTTC | |
| | | | | GCCGT | |
| AOF2 | KDM1A_NM_015013.3_21166 | GCCTCCTTTGAATGACCT | 70 | GAAGACGCACCGGGCCTTCTTTGAATGACTT | 110 |
| | | AGA | | AGAGTTAATATTCATAGCTCTAGGTCATTCAA | |
| | | | | AGGAGGCTTTTTTGAATTCGCACCAGCACGC | |
| | | | | TACGCACATGGTCACAGTACACACTGACTTC | |
| | | | | GCCGT | |
| AOF2 | KDM1A_NM_015013.3_21165 | CCTATGGCTGTGGTCAGC | 71 | GAAGACGCACCGGCCTATGGTTGTGGTCAGT | 111 |
| | | AAA | | AAAGTTAATATTCATAGCTTTGCTGACCACA | |
| | | | | GCCATAGGTTTTTTGAATTCGCACCAGCACG | |
| | | | | CTACGCAACCAGTCACAGTACACACTGCATT | |
| | | | | CGCCGT | |
| AOF2 | KDM1A_NM_015013.3_21164 | GAGCTTGCCTCCTTTGAA | 72 | GAAGACGCACCGGGAGCTTGTGTTCTTTGAA | 112 |
| | | TGA | | TGAGTTAATATTCATAGCTCATTCAAAGGAG | |
| | | | | GCAAGCTCTTTTTTGAATTCGCACCAGCACGC | |
| | | | | TACGCATGGTGTCACAGTACACACTGGTTTC | |
| | | | | GCCGT | |
| AOF2 | KDM1A_NM_015013.3_21163 | CAGGTCTTGGAGGGAAT | 73 | GAAGACGCACCGGCAGGTCTTGGAGGGGAT | 113 |
| | | CCTA | | CTTAGTTAATATTCATAGCTAGGATTCCCTCC | |
| | | | | AAGACCTGTTTTTTGAATTCGCACCAGCACG | |
| | | | | CTACGCACACAGTCACAGTACACACACTGTT | |
| | | | | CGCCGT | |
| AOF2 | KDM1A_NM_015013.3_21162 | CAGTACCTCAGCCCAAAG | 74 | GAAGACGCACCGGCAGTACTTCAGCCTAAA | 114 |
| | | AAA | | GAAAGTTAATATTCATAGCTTTCTTTGGGCTG | |
| | | | | AGGTACTGTTTTTTGAATTCGCACCAGCACG | |
| | | | | CTACGCAACACGTCACAGTACACACACACTT | |
| | | | | CGCCGT | |
| AOF2 | KDM1A_NM_015013.3_21161 | CTGGCCATTCTCAAAGGG | 75 | GAAGACGCACCGGCTGGCTATTCTTAAAGG | 115 |
| | | ATT | | GATTGTTAATATTCATAGCAATCCCTTTGAGA | |
| | | | | ATGGCCAGTTTTTTGAATTCGCACCAGCACG | |
| | | | | CTACGCATGGTGTCACAGTACACACACCATT | |
| | | | | CGCCGT | |
| AOF2 | KDM1A_NM_015013.3_21160 | GCCATGGTGGTAACAGG | 76 | GAAGACGCACCGGGCCATGGTGGTAATAGG | 116 |
| | | TCTT | | TCTTGTTAATATTCATAGCAAGACCTGTTACC | |
| | | | | ACCATGGCTTTTTTGAATTCGCACCAGCACGC | |
| | | | | TACGCAGTTGGTCACAGTACACACACGTTTC | |
| | | | | GCCGT | |
| AOF2 | KDM1A_NM_0150113_21159 | CAGGAGAAGCTGCTGGT | 77 | GAAGACGCACCGGCAGGAGAAGCTGTTGGT | 117 |
| | | ATCA | | ATTAGTTAATATTCATAGCTGATACCAGCAG | |
| | | | | CTTCTCCTGTTTTTTGAATTCGCACCAGCACG | |
| | | | | CTACGCAACGTGTCACAGTACACACCATGTT | |
| | | | | CGCCGT | |
| AOF2 | KDM1A_NM_015013.3_15448 | CCACGAGTCAAACCTTTA | 78 | GAAGACGCACCGGCCACGAGTCAAATCTTTA | 118 |
| | | TTT | | TTTGTTAATATTCATAGCAAATAAAGGTTTGA | |
| | | | | CTCGTGGTTTTTTGAATTCGCACCAGCACGCT | |
| | | | | ACGCACACAGTGTTGTGGTCACAACGTTTCG | |
| | | | | CCGT | |
| AOF2 | KDM1A_NM_015013.3_15447 | GCTACATCTTACCTTAGT | 79 | GAAGACGCACCGGGCTACATCTTACCTTAGT | 119 |
| | | CAT | | TATGTTAATATTCATAGCATGACTAAGGTAA | |
| | | | | GATGTAGCTTTTTTGAATTCGCACCAGCACG | |
| | | | | CTACGCATGACGTGTTGTGGTCACACATGTT | |
| | | | | CGCCGT | |
| AOF2 | KDM1A-725_58282 | CCGGATGACTTCTCAAGA | 80 | CCGGATGACTTCTCAAGAAGCCTCGAGGCTT | 120 |
| | | AGC | | CTTGAGAAGTCATCCGGTTTTTTGAATTCGCA | |
| | | | | CCAGCACGCTACGCAGTTGGTTGACGTTGAC | |
| | | | | ACACACTTCGCCGTCTTC | |
| AOF2 | KDM1A_NM_015013.3_15445 | GCTCCAATACTGTTGGCA | 81 | GAAGACGCACCGGGCTCCAATATTGTTGGCA | 121 |
| | | CTA | | TTAGTTAATATTCATAGCTAGTGCCAACAGTA | |
| | | | | TTGGAGCTTTTTTGAATTCGCACCAGCACGCT | |
| | | | | ACGCACACAGTGTTGTGGTCACACACATTCG | |
| | | | | CCGT | |
| AOF2 | KDM1A_NM_015013.3_15446 | CCAACAATTAGAAGCACC | 82 | GAAGACGCACCGGCCAACAATTAGAAGCAT | 122 |
| | | TTA | | CTTAGTTAATATTCATAGCTAAGGTGCTTCTA | |
| | | | | ATTGTTGGTTTTTTGAATTCGCACCAGCACGC | |
| | | | | TACGCAGTTGGTGTTGTGGTCACACAACTTC | |
| | | | | GCCGT | |

[0389] Nucleic acid LSD1 inhibitor molecules include nucleic acid molecules comprising chemical modifications, e.g., modifications to the nucleic acid base, the sugar and/or the phosphate backbone, including, for example, peptide nucleic acids, phospho morpholino backbones, phosphorothioate backbones, 5′ and 3′ end caps, 2′-Omethyl modification, 2′-F modifications, and other modifications known in the art.

### Genome Editing System LSD1 Inhibitors

[0390] Genome editing systems are known in the art, and include zinc finger nuclease gene editing systems, TALEN gene editing systems, meganuclease gene editing systems, and CRISPR gene editing systems. As used herein, the term “genome editing system” (used herein synonymously with “gene editing system”) refers to a molecule or set of molecules necessary and sufficient to direct modification, e.g., insertion or deletion, of nucleic acids, at or near a site targeted by said system. As the term is used herein, the term “genome editing system” also refers to nucleic acid encoding one or more components (e.g., molecules) of the genome editing system. Exemplary gene editing systems are known in the art, and are described more fully below.

### CRISPR Gene Editing Systems

[0391] As used herein, the terms “CRISPR System” “CRISPR/Cas System”, “CRISPR/Cas gene editing system”, “CRISPR/Cas genome editing system”, “CRISPR genome editing system” and “CRISPR gene editing system” are used synonymously herein. Naturally-occurring CRISPR systems are found in approximately 40% of sequenced eubacteria genomes and 90% of sequenced archaea. Grissa et al. (2007) BMC Bioinformatics 8: 172. This system is a type of prokaryotic immune system that confers resistance to foreign genetic elements such as plasmids and phages and provides a form of acquired immunity. Barrangou et al. (2007) Science 315: 1709-1712; Marragini et al. (2008) Science 322: 1843-1845.

[0392] The CRISPR system has been modified for use in gene editing (silencing, enhancing or changing specific genes) in eukaryotes such as mice, primates and humans. Wiedenheft et al. (2012) Nature 482: 331-8. This is accomplished by, for example, introducing into the eukaryotic cell one or more vectors encoding a specifically engineered guide RNA (gRNA) (e.g., a gRNA comprising sequence complementary to sequence of a eukaryotic genome) and one or more appropriate RNA-guided nucleases, e.g., Cas proteins. The RNA guided nuclease forms a complex with the gRNA, which is then directed to the target DNA site by hybridization of the gRNA's sequence to complementary sequence of a eukaryotic genome, where the RNA-guided nuclease then induces a double or single-strand break in the DNA. Insertion or deletion of nucleotides at or near the strand break creates the modified genome.

[0393] As these naturally occur in many different types of bacteria, the exact arrangements of the CRISPR and structure, function and number of Cas genes and their product differ somewhat from species to species. Haft et al. (2005) PLoS Comput. Biol. 1: e60; Kunin et al. (2007) Genome Biol. 8: R61; Mojica et al. (2005) J Mol. Evol. 60: 174-182; Bolotin et al. (2005)Microbiol. 151: 2551-2561; Pourcel et al. (2005) Microbiol. 151: 653-663; and Stem et al. (2010) Trends. Genet. 28: 335-340. For example, the Cse (Cas subtype, E. coli) proteins (e.g., CasA) form a functional complex, Cascade, that processes CRISPR RNA transcripts into spacer-repeat units that Cascade retains. Brouns et al. (2008) Science 321: 960-964. In other prokaryotes, Cas6 processes the CRISPR transcript. The CRISPR-based phage inactivation in E. coli requires Cascade and Cas3, but not Cas1 or Cas2. The Cmr (Cas RAMP module) proteins in Pyrococcus furiosus and other prokaryotes form a functional complex with small CRISPR RNAs that recognizes and cleaves complementary target RNAs. A simpler CRISPR system relies on the protein Cas9, which is a nuclease with two active cutting sites, one for each strand of the double helix. Combining Cas9 and modified CRISPR locus RNA can be used in a system for gene editing. Pennisi (2013) Science 341: 833-836.

[0394] With respect to general information on CRISPR-Cas Systems, components thereof, and delivery of such components, including methods, materials, delivery vehicles, vectors, particles, AAV, and making and using thereof, including as to amounts and formulations, all useful in the practice of the instant invention, reference is made to: U.S. Pat. Nos. 8,697,359, 8,771,945, 8,795,965, 8,865,406, 8,871,445, 8,889,356, 8,889,418 and 8,895,308; US Patent Publications US 2014-0310830 (U.S. application Ser. No. 14/105,031), US 2014-0287938 A1 (U.S. application Ser. No. 14/213,991), US 2014-0273234 A1 (U.S. application Ser. No. 14/293,674), US2014-0273232 A1 (U.S. application Ser. No. 14/290,575), US 2014-0273231 (U.S. application Ser. No. 14/259,420), US 2014-0256046 A1 (U.S. application Ser. No. 14/226,274), US 2014-0248702 A1 (U.S. application Ser. No. 14/258,458), US 2014-0242700 A1 (U.S. application Ser. No. 14/222,930), US 2014-0242699 A1 (U.S. application Ser. No. 14/183,512), US 2014-0242664 A1 (U.S. application Ser. No. 14/104,990), US 2014-0234972 A1 (U.S. application Ser. No. 14/183,471), US 2014-0227787 A1 (U.S. application Ser. No. 14/256,912), US 2014-0189896 A1 (U.S. application Ser. No. 14/105,035), US 2014-0186958 (U.S. application Ser. No. 14/105,017), US 2014-0186919 A1 (U.S. application Ser. No. 14/104,977), US 2014-0186843 A1 (U.S. application Ser. No. 14/104,900), US 2014-0179770 A1 (U.S. application Ser. No. 14/104,837) and US 2014-0179006 A1 (U.S. application Ser. No. 14/183,486), US 2014-0170753 (U.S. application Ser. No. 14/183,429); European Patent Applications EP 2 771 468 (EP13818570.7), EP 2 764 103 (EP13824232.6), and EP 2 784 162 (EP14170383.5); and PCT Patent Publications WO 2014/093661 (PCT/US2013/074743), WO 2014/093694 (PCT/US2013/074790), WO 2014/093595 (PCT/US2013/074611), WO 2014/093718 (PCT/US2013/074825), WO 2014/093709 (PCT/US2013/074812), WO 2014/093622 (PCT/US2013/074667), WO 2014/093635 (PCT/US2013/074691), WO 2014/093655 (PCT/US2013/074736), WO 2014/093712 (PCT/US2013/074819), WO 2014/093701 (PCT7US2013/074800), WO 2014/018423 (PCT/US2013/051418), WO 2014/204723 (PCT/US2014/041790), WO 2014/204724 (PCT/US2014/041800), WO 2014/204725 (PCT/US2014/041803), WO 2014/204726 (PCT US2014/041804), WO 2014/204727 (PCT US2014/041806), WO 2014/204728 (PCT/US2014/041808), and WO 2014/204729 (PCT US2014/041809). Reference is also made to U.S. provisional patent applications 61/758,468; 61/802,174; 61/806,375; 61/814,263; 61/819,803 and 61/828,130, filed on Jan. 30, 2013; Mar. 15, 2013; Mar. 28, 2013; Apr. 20, 2013; May 6, 2013 and May 28, 2013 respectively. Reference is also made to U.S. provisional patent application 61/836,123, filed on Jun. 17, 2013. Reference is additionally made to U.S. provisional patent applications 61/835,931, 61/835,936, 61/836,127, 61/836,101, 61/836,080 and 61/835,973, each filed Jun. 17, 2013. Further reference is made to U.S. provisional patent applications 61/862,468 and 61/862,355 filed on Aug. 5, 2013; 61/871,301 filed on Aug. 28, 2013; 61/960,777 filed on Sep. 25, 2013 and 61/961,980 filed on Oct. 28, 2013. Reference is yet further made to: PCT Patent applications Nos: PCT/US2014/041803, PCT/US2014/041800, PCT/US2014/041809, PCT/US2014/041804 and PCT US2014/041806, each filed Jun. 10, 2014.6/10/14; PCT US2014/041808 filed Jun. 11, 2014; and PCT/US2014/62558 filed Oct. 28, 2014, and U.S. Provisional Patent Applications Ser. Nos. 61/915,150, 61/915,301, 61/915,267 and 61/915,260, each filed Dec. 12, 2013; 61/757,972 and 61/768,959, filed on Jan. 29, 2013 and Feb. 25, 2013; 61/835,936, 61/836,127, 61/836,101, 61/836,080, 61/835,973, and 61/835,931, filed Jun. 17, 2013; 62/010,888 and 62/010,879, both filed Jun. 1.1, 2014; 62/010,329 and 62/010,441, each filed Jun. 10, 2014; 61/939,228 and 61/939,242, each filed Feb. 12, 2014; 61/980,012, filed Apr. 15, 2014; 62/038,358, filed Aug. 17, 2014; 62/054,490, 62/055,484, 62/055,460 and 62/055,487, each filed Sep. 25, 2014; and 62/069,243, filed Oct. 27, 2014. Reference is also made to U.S. provisional patent applications Nos. 62/055,484, 62/055,460, and 62/055,487, filed Sep. 25, 2014; U.S. provisional patent application 61/980,012, filed Apr. 15, 2014; and U.S. provisional patent application 61/939,242 filed Feb. 12, 2014. Reference is made to PCT application designating, inter alia, the United States, application No. PCT/US 14/41806, filed Jun. 10, 2014. Reference is made to U.S. provisional patent application 61/930,214 filed on Jan. 22, 2014. Reference is made to U.S. provisional patent applications 61/915,251, 61/915,260 and 61/915,267, each filed on Dec. 12, 2013. Reference is made to US provisional patent application U.S. Ser. No. 61/980,012 filed Apr. 15, 2014. Reference is made to PCT application designating, inter alia, the United States, application No. PCT/US 14/41806, filed Jun. 10, 2014. Reference is made to U.S. provisional patent application 61/930,214 filed on Jan. 22, 2014. Reference is made to U.S. provisional patent applications 61/915,251; 61/915,260 and 61/915,267, each filed on Dec. 12, 2013. [0054] Mention is also made of U.S. application 62/091,455, filed, 12 Dec. 2014, PROTECTED GUIDE RNAS (PGRNAS); U.S. application 62/096,708, 24 Dec. 2014, PROTECTED GUIDE RNAS (PGRNAS); U.S. application 62/091,462, 12 Dec. 2014, DEAD GUIDES FOR CRISPR TRANSCRIPTION FACTORS; U.S. application 62/096,324, 23 Dec. 2014, DEAD GUIDES FOR CRISPR TRANSCRIPTION FACTORS; U.S. application 62/091,456, 12 Dec. 2014, ESCORTED AND FUNCTIONALIZED GUIDES FOR CRISPR-CAS SYSTEMS; U.S. application 62/091,461, 12 Dec. 2014, DELIVERY, USE AND THERAPEUTIC APPLICATIONS OF THE CRISPR-CAS SYSTEMS AND COMPOSITIONS FOR GENOME EDITING AS TO HEMATOPOETIC STEM CELLS (HSCs); U.S. application 62/094,903, 19 Dec. 2014, UNBIASED IDENTIFICATION OF DOUBLE-STRAND BREAKS AND GENOMIC REARRANGEMENT BY GENOME-WISE INSERT CAPTURE SEQUENCING; U.S. application 62/096,761, 24 Dec. 2014, ENGINEERING OF SYSTEMS, METHODS AND OPTIMIZED ENZYME AND GUIDE SCAFFOLDS FOR SEQUENCE MANIPULATION; U.S. application 62/098,059, 30 Dec. 2014, RNA-TARGETING SYSTEM; U.S. application 62/096,656, 24 Dec. 2014, CRISPR HAVING OR ASSOCIATED WITH DESTABILIZATION DOMAINS; U.S. application 62/096,697, 24 Dec. 2014, CRISPR HAVING OR ASSOCIATED WITH AAV; U.S. application 62/098,158, 30 Dec. 2014, ENGINEERED CRISPR COMPLEX INSERTIONAL TARGETING SYSTEMS; U.S. application 62/151,052, 22 Apr. 2015, CELLULAR TARGETING FOR EXTRACELLULAR EXOSOMAL REPORTING; U.S. application 62/054,490, 24 Sep. 2014, DELIVERY, USE AND THERAPEUTIC APPLICATIONS OF THE CRISPR-CAS SYSTEMS AND COMPOSITIONS FOR TARGETING DISORDERS AND DISEASES USING PARTICLE DELIVERY COMPONENTS; U.S. application 62/055,484, 25 Sep. 2014, SYSTEMS, METHODS AND COMPOSITIONS FOR SEQUENCE MANIPULATION WITH OPTIMIZED FUNCTIONAL CRISPR-CAS SYSTEMS; U.S. application 62/087,537, 4 Dec. 2014, SYSTEMS, METHODS AND COMPOSITIONS FOR SEQUENCE MANIPULATION WITH OPTIMIZED FUNCTIONAL CRISPR-CAS SYSTEMS; U.S. application 62/054,651, 24 Sep. 2014, DELIVERY, USE AND THERAPEUTIC APPLICATIONS OF THE CRISPR-CAS SYSTEMS AND COMPOSITIONS FOR MODELING COMPETITION OF MULTIPLE CANCER MUTATIONS IN VIVO; U.S. application 62/067,886, 23 Oct. 2014, DELIVERY, USE AND THERAPEUTIC APPLICATIONS OF THE CRISPR-CAS SYSTEMS AND COMPOSITIONS FOR MODELING COMPETITION OF MULTIPLE CANCER MUTATIONS IN VIVO; U.S. application 62/054,675, 24 Sep. 2014, DELIVERY, USE AND THERAPEUTIC APPLICATIONS OF THE CRISPR-CAS SYSTEMS AND COMPOSITIONS IN NEURONAL CELLS/TISSUES; U.S. application 62/054,528, 24 Sep. 2014, DELIVERY, USE AND THERAPEUTIC APPLICATIONS OF THE CRISPR-CAS SYSTEMS AND COMPOSITIONS IN IMMUNE DISEASES OR DISORDERS; US application 62/055,454, 25 Sep. 2014, DELIVERY, USE AND THERAPEUTIC APPLICATIONS OF THE CRISPR-CAS SYSTEMS AND COMPOSITIONS FOR TARGETING DISORDERS AND DISEASES USING CELL PENETRATION PEPTIDES (CPP); U.S. application 62/055,460, 25 Sep. 2014, MULTIFUNCTIONAL-CRISPR COMPLEXES AND/OR OPTIMIZED ENZYME LINKED FUNCTION AL-CRISPR COMPLEXES; U.S. application 62/087,475, 4 Dec. 2014, FUNCTIONAL SCREENING WITH OPTIMIZED FUNCTIONAL CRISPR-CAS SYSTEMS; U.S. application 62/055,487, 25 Sep. 2014, FUNCTIONAL SCREENING WITH OPTIMIZED FUNCTIONAL CRISPR-CAS SYSTEMS; U.S. application 62/087,546, 4 Dec. 2014, MULTIFUNCTIONAL CRISPR COMPLEXES AND/OR OPTIMIZED ENZYME LINKED FUNCTIONAL-CRISPR COMPLEXES; and U.S. application 62/098,285, 30 Dec. 2014, CRISPR MEDIATED IN VIVO MODELING AND GENETIC SCREENING OF TUMOR GROWTH AND METASTASIS.

[0395] Each of these patents, patent publications, and applications, and all documents cited therein or during their prosecution (“appln cited documents”) and all documents cited or referenced in the appln cited documents, together with any instructions, descriptions, product specifications, and product sheets for any products mentioned therein or in any document therein and incorporated by reference herein, are hereby incorporated herein by reference, and may be employed in the practice of the invention. All documents (e.g., these patents, patent publications and applications and the appln cited documents) are incorporated herein by reference to the same extent as if each individual document was specifically and individually indicated to be incorporated by reference.

[0396] Also with respect to general information on CRISPR-Cas Systems, mention is made of the following (also hereby incorporated herein by reference):
[0397] Multiplex genome engineering using CRISPR/Cas systems, Cong, L., Ran, F. A., Cox, D., Lin, S., Barretto, R., Habib, N., Hsu, P. D., Wu, X., Jiang, W., Marraffini, L. A., & Zhang, F. Science February 15; 339(6121):819-23 (2013); RNA-gided editing of bacterial genomes using CRISPR-Cas systems. Jiang W., Bikard D., Cox D., Zhang F, Marraffini L A. Nat Biotechnol March; 31(3):233-9 (2013); One-Step Generation of Mice Carrying Mutations in Multiple Genes by CRISPR/Cas-Mediated Genome Engineering. Wang H., Yang H., Shivalila C S., Dawlaty M M., Cheng A W., Zhang F., Jaenisch R. Cell May 9; 153(4):910-8 (2013); Optical control of mammalian endogenous transcription and epigenetic states. Konermann S, Brigham M D, Trevino A E, Hsu P D, Heidenreich M, Cong L, Piatt R J, Scott D A, Church G M, Zhang F. Nature. 2013 Aug. 22; 500(7463):472-6. doi: 10.1038/Nature 12466. Epub 2013 Aug. 23;
[0398] Double Nicking by RNA-Guided CRISPR Cas9 for Enhanced Genome Editing Specificity. Ran, F A., Hsu, P D., Lin, C Y., Gootenberg, J S., Konermann, S., Trevino, A E, Scott, D A., Inoue, A., Matoba, S., Zhang, Y, & Zhang, F. Cell August 28. pii: S0092-8674(13)01015-5. (2013
[0399] DNA targeting specificity of RNA-guided Cas9 nucleases. Hsu, P., Scott, D., Weinstein, J., Ran, F A., Konermann, S., Agarwala, V., Li, Y., Fine, E., Wu, X., Shalem, O., Cradick, T J., Marraffini, L A., Bao, G., & Zhang, F. Nat Biotechnol doi: 10.1038/nbt.2647 (2013);
[0400] Genome engineering using the CRISPR-Cas9 system. Ran, F A., Hsu, P D., Wright, J., Agarwala, V., Scott, D A., Zhang, F. Nature Protocols November; 8(11):2281-308. (2013); Genome-Scale CRISPR-Cas9 Knockout Screening in Human Cells. Shalem, O., Sanjana, N E., Hartenian, E., Shi, X., Scott, D A., Mikkelson, T., Heckl, D., Ebert, B L., Root, D E., Doench, J G., Zhang, F. Science December 12. (2013). [Epub ahead of print]; Crystal structure of cas9 in complex with guide RNA and target DNA. Nishimasu, H., Ran, F A., Hsu, P D., Konermann, S., Shehata, S I., Dohmae, N., Ishitani, R., Zhang, F., Nureki, O. Cell February 27. (2014). 156(5):935-49;
[0401] Genome-wide binding of the CRISPR endonuclease Cas9 in mammalian cells. Wu X., Scott D A., Kriz A J., Chiu A C, Hsu P D., Dadon D B., Cheng A W., Trevino A E., Konermann S., Chen S., Jaenisch R., Zhang F., Sharp P A. Nat Biotechnol. (2014) April 20. doi: 10.1038/nbt.2889,
[0402] CRISPR-Cas9 Knockin Mice for Genome Editing and Cancer Modeling, Piatt et al., Cell 159(2): 440-455 (2014) DOI: 10.1016/j.cell.2014.09.014,
[0403] Development and Applications of CRISPR-Cas9 for Genome Engineering, Hsu et al. Cell 157, 1262-1278 (Jun. 5, 2014) (Hsu 2014),
[0404] Genetic screens in human cells using the CRISPR/Cas9 system, Wang et al., Science. 2014 Jan. 3; 343(6166): 80-84. doi: 10.1126/science.1246981,
[0405] Rational design of highly active sgRNAs for CRISPR-Cas9-mediated gene inactivation, Doench et al., Nature Biotechnology published online 3 Sep. 2014; doi: 10.1038/nbt.3026, and In vivo interrogation of gene function in the mammalian brain using CRISPR-Cas9, Swiech et al, Nature Biotechnology; published online 19 Oct. 2014; doi: 10.1038/nbt.3055.
[0406] Genome-scale transcriptional activation by an engineered CRISPR-Cas9 complex, onermann S, Brigham M D, Trevino A E, Joung J, Abudayyeh 00, Barcena C, Hsu P D, Habib N, Gootenberg J S, Nishimasu H, Nureki 0, Zhang F., Nature. January 29; 517(7536):583-8 (2015).
[0407] A split-Cas9 architecture for inducible genome editing and transcription modulation, Zetsche B, Volz S E, Zhang F., (published online 2 Feb. 2015) Nat Biotechnol. February; 33(2): 139-42 (2015);
[0408] Genome-wide CRISPR Screen in a Mouse Model of Tumor Growth and Metastasis, Chen S, Sanjana N E, Zheng, Shalem O, Lee, Shi X, Scott D A, Song J, Pan J Q, Weissleder R, Lee H, Zhang F, Sharp P A. Cell 160, 1246-1260, Mar. 12, 2015 (multiplex screen in mouse), and
[0409] In vivo genome editing using Staphylococcus aureus Cas9, Ran F A, Cong L, Yan W X, Scott D A, Gootenberg J S, Kriz A J, Zetsche B, Shalem O, Wu X, Makarova K S, oonin EV, Sharp P A, Zhang F., (published online 1 Apr. 2015), Nature. April 9; 520(7546): 186-91 (2015).
[0410] High-throughput functional genomics using CRISPR-Cas9, Shalem et al, Nature Reviews Genetics 16, 299-311 (May 2015).
[0411] Sequence determinants of improved CRISPR sgRNA design, Xu et al., Genome Research 25, 1 147-1 157 (August 2015).
[0412] A Genome-wide CRISPR Screen in Primary Immune Cells to Dissect Regulatory Networks, Parnas et al., Cell 162, 675-686 (Jul. 30, 2015).
[0413] CRISPR/Cas9 cleavage of viral DNA efficiently suppresses hepatitis B virus, Ramanan et al., Scientific Reports 5:10833. doi: 10.1038/srep10833 (Jun. 2, 2015).
[0414] Crystal Structure of Staphylococcus aureus Cas9, Nishimasu et al., Cell 162, 1113-1126 (Aug. 27, 2015).
[0415] BCL11A enhancer dissection by Cas9-mediated in situ saturating mutagenesis, Canver et al., Nature 527(7577): 192-7 (Nov. 12, 2015) doi: 10.1038/naturel 5521. Epub 2015 Sep. 16. each of which is incorporated herein by reference, and discussed briefly below:
[0416] Cong et al. engineered type II CRISPR/Cas systems for use in eukaryotic cells based on both Streptococcus thermophilus Cas9 and also Streptoccocus pyogenes Cas9 and demonstrated that Cas9 nucleases can be directed by short RNAs to induce precise cleavage of DNA in human and mouse cells. Their study further showed that Cas9 as converted into a nicking enzyme can be used to facilitate homology-directed repair in eukaryotic cells with minimal mutagenic activity. Additionally, their study demonstrated that multiple guide sequences can be encoded into a single CRISPR array to enable simultaneous editing of several at endogenous genomic loci sites within the mammalian genome, demonstrating easy programmability and wide applicability of the RNA-guided nuclease technology. This ability to use RNA to program sequence specific DNA cleavage in cells defined a new class of genome engineering tools. These studies further showed that other CRISPR loci are likely to be transplantable into mammalian cells and can also mediate mammalian genome cleavage. Importantly, it can be envisaged that several aspects of the CRISPR/Cas system can be further improved to increase its efficiency and versatility.
[0417] Jiang et al. used the clustered, regularly interspaced, short palindromic repeats (CRISPR)-associated Cas9 endonuclease complexed with dual-RNAs to introduce precise mutations in the genomes of Streptococcus pneumoniae and Escherichia coli. The approach relied on dual-RNA:Cas9-directed cleavage at the targeted genomic site to kill unmutated cells and circumvents the need for selectable markers or counter-selection systems, The study reported reprogramming dual-RNA:Cas9 specificity by changing the sequence of short CRISPR RNA (crRNA) to make single- and multinucleotide changes carried on editing templates. The study showed that simultaneous use of two crRNAs enabled multiplex mutagenesis. Furthermore, when the approach was used in combination with recombineering, in S. pneumoniae, nearly 100% of cells that were recovered using the described approach contained the desired mutation, and in E. coli, 65% that were recovered contained the mutation.
[0418] Wang et al. (2013) used the CRISPR/Cas system for the one-step generation of mice carrying mutations in multiple genes which were traditionally generated in multiple steps by sequential recombination in embryonic stem cells and/or time-consuming intercrossing of mice with a single mutation. The CRISPR/Cas system will greatly accelerate the in vivo study of functionally redundant genes and of epistatic gene interactions.
[0419] Konermann et al. addressed the need in the art for versatile and robust technologies that enable optical and chemical modulation of DNA-binding domains based CRISPR Cas9 enzyme and also Transcriptional Activator Like Effectors.
[0420] Ran et al. (2013-A) described an approach that combined a Cas9 nickase mutant with paired guide RNAs to introduce targeted double-strand breaks. This addresses the issue of the Cas9 nuclease from the microbial CRISPR-Cas system being targeted to specific genomic loci by a guide sequence, which can tolerate certain mismatches to the DNA target and thereby promote undesired off-target mutagenesis. Because individual nicks in the genome are repaired with high fidelity, simultaneous nicking via appropriately offset guide RNAs is required for double-stranded breaks and extends the number of specifically recognized bases for target cleavage. The authors demonstrated that using paired nicking can reduce off-target activity by 50- to 1,500-fold in cell lines and to facilitate gene knockout in mouse zygotes without sacrificing on-target cleavage efficiency. This versatile strategy enables a wide variety of genome editing applications that require high specificity. Hsu et al. (2013) characterized SpCas9 targeting specificity in human cells to inform the selection of target sites and avoid off-target effects. The study evaluated >700 guide RNA variants and SpCas9-induced indel mutation levels at >100 predicted genomic off-target loci in 293T and 293FT cells. The authors that SpCas9 tolerates mismatches between guide RNA and target DNA at different positions in a sequence-dependent manner, sensitive to the number, position and distribution of mismatches. The authors further showed that SpCas9-mediated cleavage is unaffected by DNA methylation and that the dosage of SpCas9 and sgRNA can be titrated to minimize off-target modification. Additionally, to facilitate mammalian genome engineering applications, the authors reported providing a web-based software tool to guide the selection and validation of target sequences as well as off-target analyses.
[0421] Ran et al. (2013-B) described a set of tools for Cas9-mediated genome editing via non-homologous end joining (NHEJ) or homology-directed repair (HDR) in mammalian cells, as well as generation of modified cell lines for downstream functional studies. To minimize off-target cleavage, the authors further described a double-nicking strategy using the Cas9 nickase mutant with paired guide RNAs. The protocol provided by the authors experimentally derived guidelines for the selection of target sites, evaluation of cleavage efficiency and analysis of off-target activity. The studies showed that beginning with target design, gene modifications can be achieved within as little as 1-2 weeks, and modified clonal cell lines can be derived within 2-3 weeks.
[0422] Shaiem et al. described a new way to interrogate gene function on a genome-wide scale. Their studies showed that delivery of a genome-scale CRISPR-Cas9 knockout (GeC O) library targeted 18,080 genes with 64,751 unique guide sequences enabled both negative and positive selection screening in human cells. First, the authors showed use of the GeCKO library to identify genes essential for cell viability in cancer and pluripotent stem cells. Next, in a melanoma model, the authors screened for genes whose loss is involved in resistance to vemurafenib, a therapeutic that inhibits mutant protein kinase BRAF. Their studies showed that the highest-ranking candidates included previously validated genes NF1 and MED 12 as well as novel hits NF2, CUL3, TADA2B, and TADAL The authors observed a high level of consistency between independent guide RNAs targeting the same gene and a high rate of hit confirmation, and thus demonstrated the promise of genome-scale screening with Cas9.
[0423] Nishimasu et al. reported the crystal structure of Streptococcus pyogenes Cas9 in complex with sgRNA and its target DNA at 2.5 A° resolution. The structure revealed a bilobed architecture composed of target recognition and nuclease lobes, accommodating the sgRNA:DNA heteroduplex in a positively charged groove at their interface. Whereas the recognition lobe is essential for binding sgRNA and DNA, the nuclease lobe contains the HNH and RuvC nuclease domains, which are properly positioned for cleavage of the complementary and non-complementary strands of the target DNA, respectively. The nuclease lobe also contains a carboxyl-terminal domain responsible for the interaction with the protospacer adjacent motif (PAM). This high-resolution structure and accompanying functional analyses have revealed the molecular mechanism of RNA-guided DNA targeting by Cas9, thus paving the way for the rational design of new, versatile genome-editing technologies.
[0424] Wu et al. mapped genome-wide binding sites of a catalytically inactive Cas9 (dCas9) from Streptococcus pyogenes loaded with single guide RNAs (sgRNAs) in mouse embryonic stem cells (mESCs). The authors showed that each of the four sgRNAs tested targets dCas9 to between tens and thousands of genomic sites, frequently characterized by a 5-nucleotide seed region in the sgRNA and an NGG protospacer adjacent motif (PAM). Chromatin inaccessibility decreases dCas9 binding to other sites with matching seed sequences; thus 70% of off-target sites are associated with genes. The authors showed that targeted sequencing of 295 dCas9 binding sites in mESCs transfected with catalytically active Cas9 identified only one site mutated above background levels. The authors proposed a two-state model for Cas9 binding and cleavage, in which a seed match triggers binding but extensive pairing with target DNA is required for cleavage.
[0425] Piatt et al. established a Cre-dependent Cas9 knockin mouse. The authors demonstrated in vivo as well as ex vivo genome editing using adeno-associated virus (AAV)-, lentivirus-, or particle-mediated delivery of guide RNA in neurons, immune cells, and endothelial cells.
[0426] Hsu et al. (2014) is a review article that discusses generally CRISPR-Cas9 history from yogurt to genome editing, including genetic screening of cells.
[0427] Wang et al, (2014) relates to a pooled, loss-of-function genetic screening approach suitable for both positive and negative selection that uses a genome-scale lentiviral single guide RNA (sgRNA) library.
[0428] Doench et al. created a pool of sgRNAs, tiling across all possible target sites of a panel of six endogenous mouse and three endogenous human genes and quantitatively assessed their ability to produce null alleles of their target gene by antibody staining and flow cytometry. The authors showed that optimization of the PAM improved activity and also provided an on-line tool for designing sgRNAs. Swiech et al. demonstrate that AAV-mediated SpCas9 genome editing can enable reverse genetic studies of gene function in the brain.
[0429] Konermann et al. (2015) discusses the ability to attach multiple effector domains, e.g., transcriptional activator, functional and epigenomic regulators at appropriate positions on the guide such as stem or tetraloop with and without linkers.
[0430] Zetsche et al. demonstrates that the Cas9 enzyme can be split into two and hence the assembly of Cas9 for activation can be controlled.
[0431] Chen et al relates to multiplex screening by demonstrating that a genome-wide in vivo CRISPR-Cas9 screen in mice reveals genes regulating lung metastasis. >Ran et al. (2015) relates to SaCas9 and its ability to edit genomes and demonstrates that one cannot extrapolate from biochemical assays. Shalem et al. (2015) described ways in which catalytically inactive Cas9 (dCas9) fusions are used to synthetically repress (CRISPRi) or activate (CRISPRa) expression, showing, advances using Cas9 for genome-scale screens, including arrayed and pooled screens, knockout approaches that inactivate genomic loci and strategies that modulate transcriptional activity.
[0432] Shalem et al. (2015) described ways in which catalytically inactive Cas9 (dCas9) fusions are used to synthetically repress (CRISPRi) or activate (CRISPRa) expression, showing, advances using Cas9 for genome-scale screens, including arrayed and pooled screens, knockout approaches that inactivate genomic loci and strategies that modulate transcriptional activity.
[0433] Xu et al. (2015) assessed the DNA sequence features that contribute to single guide RNA (sgRNA) efficiency in CRISPR-based screens. The authors explored efficiency of CRISPR/Cas9 knockout and nucleotide preference at the cleavage site. The authors also found that the sequence preference for CRISPRi/a is substantially different from that for CRISPR Cas9 knockout.
[0434] Parnas et al. (2015) introduced genome-wide pooled CRISPR-Cas9 libraries into dendritic cells (DCs) to identify genes that control the induction of tumor necrosis factor (Tnf) by bacterial lipopolysaccharide (LPS). Known regulators of Tlr4 signaling and previously unknown candidates were identified and classified into three functional modules with distinct effects on the canonical responses to LPS.
[0435] Ramanan et al (2015) demonstrated cleavage of viral episomal DNA (cccDNA) in infected cells. The HBV genome exists in the nuclei of infected hepatocytes as a 3.2 kb double-stranded episomal DNA species called covalently closed circular DNA (cccDNA), which is a key component in the HBV life cycle whose replication is not inhibited by current therapies. The authors showed that sgRNAs specifically targeting highly conserved regions of HBV robustly suppresses viral replication and depleted cccDNA. Nishimasu et al. (2015) reported the crystal structures of SaCas9 in complex with a single guide RNA (sgRNA) and its double-stranded DNA targets, containing the 5′-TTGAAT-3′ PAM and the 5′-TTGGGT-3′ PAM. A structural comparison of SaCas9 with SpCas9 highlighted both structural conservation and divergence, explaining their distinct PAM specificities and orthologous sgRNA recognition.
[0436] Slaymaker et al (2015) reported the use of structure-guided protein engineering to improve the specificity of Streptococcus pyogenes Cas9 (SpCas9). The authors developed “enhanced specificity” SpCas9 (eSpCas9) variants which maintained robust on-target cleavage with reduced off-target effects.
[0437] Tsai et al, “Dimeric CRISPR A-guided Fok1 nucleases for highly specific genome editing,” Nature Biotechnology 32(6): 569-77 (2014) which is not believed to be prior art to the instant invention or application, but which may be considered in the practice of the instant invention. Mention is also made of Konermann et al., “Genome-scale transcription activation by an engineered CRISPR-Cas9 complex,” doi:10.1038/nature14136, incorporated herein by reference.

[0438] In general, the CRISPR-Cas or CRISPR system is as used in the foregoing documents, such as WO 2014/093622 (PCT/US2013/074667) and refers collectively to transcripts and other elements involved in the expression of or directing the activity of CRISPR-associated (Cas) genes, including sequences encoding a Cas gene, a tracr (trans-activating CRISPR) sequence (e.g. tracrRNA or an active partial tracrRNA), a tracr-mate sequence (encompassing a direct repeat and a tracrRNA-processed partial direct repeat in the context of an endogenous CRISPR system), a guide sequence (also referred to as a spacer in the context of an endogenous CRISPR system), or gRNA(s) as that term is herein used (including, e.g., single guide RNA (sgRNA) (chimeric RNA) and dual guide RNAs (dgRNAs)). In the context CRISPR systems a, “target sequence” refers to a sequence to which the targeting domain sequence of a gRNA molecule is designed to have complementarity, where hybridization between a target sequence and a targeting domain sequence of a gRNA directs the CRISPR system to the locus comprising the target sequence. A target sequence may comprise any polynucleotide, such as DNA or RNA polynucleotides. In some embodiments, a target sequence is located in the nucleus or cytoplasm of a cell. In some embodiments, direct repeats may be identified in silico by searching for repetitive motifs that fulfill any or all of the following criteria: 1. found in a 2 Kb window of genomic sequence flanking the type II CRISPR locus; 2. span from 20 to 50 bp; and 3. interspaced by 20 to 50 bp. In some embodiments, 2 of these criteria may be used, for instance 1 and 2, 2 and 3, or 1 and 3. In some embodiments, all 3 criteria may be used. In some embodiments it may be preferred in a CRISPR system that the tracr sequence has one or more hairpins and is 30 or more nucleotides in length, 40 or more nucleotides in length, or 50 or more nucleotides in length; the guide sequence is between 10 to 30 nucleotides in length, the CRISPR/Cas enzyme is a Type II Cas9 enzyme. In embodiments of the invention the terms guide sequence and guide RNA are used interchangeably as in foregoing cited documents such as WO 2014/093622 (PCT US2013/074667). In general, a guide sequence is any polynucleotide sequence having sufficient complementarity with a target sequence to hybridize with the target sequence and direct sequence-specific binding of a CRISPR system to the target sequence. In some embodiments, the degree of complementarity between a guide sequence and its corresponding target sequence, when optimally aligned using a suitable alignment algorithm, is about or more than about 50%, 60%, 75%, 80%, 85%, 90%, 95%, 97.5%, 99%, or more. Optimal alignment may be determined with the use of any suitable algorithm for aligning sequences, non-limiting example of which include the Smith-Waterman algorithm, the Needleman-Wunsch algorithm, algorithms based on the Burrows-Wheeler Transform (e.g. the Burrows Wheeler Aligner), ClustalW, Clustal X, BLAT, Novoalign (Novocraft Technologies; available at www.novocraft.com), ELAND (Illumina, San Diego, CA), SOAP (available at soap.genomics.org.cn), and aq (available at maq.sourceforge.net). In some embodiments, a guide sequence is about or more than about 5, 10, 11, 12, 13, 14, 15, 16, 17, 18, 19, 20, 21, 22, 23, 24, 25, 26, 27, 28, 29, 30, 35, 40, 45, 50, 75, or more nucleotides in length. In some embodiments, a guide sequence is less than about 75, 50, 45, 40, 35, 30, 25, 20, 15, 12, or fewer nucleotides in length. Preferably the guide sequence is 10⁻³⁰ nucleotides long. The ability of a guide sequence to direct sequence-specific binding of a CRISPR system to a target sequence may be assessed by any suitable assay. For example, the components of a CRISPR system sufficient to form a CRISPR system, including the guide sequence to be tested, may be provided to a host cell having the corresponding target sequence, such as by transfection with vectors encoding the components of the CRISPR sequence, followed by an assessment of preferential cleavage within the target sequence, such as by Surveyor assay as described in the literature and known to those skilled in the art. Similarly, cleavage of a target polynucleotide sequence may be evaluated in a test tube by providing the target sequence, components of a CRISPR system, including the guide sequence to be tested and a control guide sequence different from the test guide sequence, and comparing binding or rate of cleavage at the target sequence between the test and control guide sequence reactions. Other assays are possible, and will occur to those skilled in the art. A guide sequence may be selected to target any target sequence. In some embodiments, the target sequence is a sequence within a genome of a cell. Exemplary target sequences include those that are unique in the target genome. For example, for the S. pyogenes Cas9, a unique sequence in a genome may include a Cas9 target sequence of the form NNNNNNNNNNNNNNNNNNNNXGG (where N is A, G, T, or C; and X can be anything), wherein the sequence has a single occurrence in the genome. For the S. thermophilus CRISPR/Cas9 system, a unique sequence in a genome may include a Cas9 target site of the form NNNNNNNNNNNNNNNNNNNNXXAGAAW (SEQ ID NO: 863) (where N is A, G, T, or C; X can be anything; and W is A or T), wherein the sequence has a single occurrence in the genome. For the S. pyogenes Cas9 or the S. thermophilus Cas9, a unique sequence in a genome may include a Cas9 target site of the form NNNNNNNNNNNNNNNNNNNNXGGXG (where N is A, G, T, or C; and X can be anything), wherein the sequence has a single occurrence in the genome. In some embodiments, a guide RNA sequence is selected to reduce the degree secondary structure within the guide RNA sequence. In some embodiments, about or less than about 75%, 50%, 40%, 30%, 25%, 20%, 15%, 10%, 5%, 1%, or fewer of the nucleotides of the guide sequence participate in self-complementary base pairing when optimally folded. Optimal folding may be determined by any suitable polynucleotide folding algorithm. Some programs are based on calculating the minimal Gibbs free energy. An example of one such algorithm is mFold, as described by Zuker and Stiegler (Nucleic Acids Res. 9 (1981), 133-148). Another example folding algorithm is the online webserver RNAfold, developed at Institute for Theoretical Chemistry at the University of Vienna, using the centroid structure prediction algorithm (see e.g. A. R. Gruber et al., 2008, Cell 106(1): 23-24; and PA Carr and GM Church, 2009, Nature Biotechnology 27(12): 1 151-62).

[0439] In some embodiments, the RNA-guided nuclease is a Cas molecule, e.g., a Cas9 molecule. Cas9 molecules of a variety of species can be used in the methods and compositions described herein. In preferred embodiments, the Cas9 molecule is a S. pyogenes Cas9 molecule. In embodiments, the Cas9 molecule is derived from a S. pyogenes Cas9 molecule (e.g., UniProt Q99ZW2). While the S. pyogenes Cas9 molecule are the subject of much of the disclosure herein, Cas9 molecules of, derived from, or based on the Cas9 proteins of other species listed herein can be used as well. In other words, other Cas9 molecules, e.g., S. thermophilus, Staphylococcus aureus and/or Neisseria meningitidis Cas9 molecules, may be used in the systems, methods and compositions described herein. Additional Cas9 species include: Acidovorax avenae, Actinobacillus pleuropneumoniae, Actinobacillus succinogenes, Actinobacillus suis, Actinomyces sp., cycliphilus denitrificans, Aminomonas paucivorans, Bacillus cereus, Bacillus smithii, Bacillus thuringiensis, Bacteroides sp., Blastopirellula marina, Bradyrhizobium sp., Brevibacillus latemsporus, Campylobacter coli, Campylobacter jejuni, Campylobacter lad, Candidatus puniceispirillum, Clostridiu cellulolyticum, Clostridium perfringens, Corynebacterium accolens, Corynebacterium diphtheria, Corynebacterium matruchotii, Dinoroseobacter sliibae, Eubacterium dolichum, gamma proteobacterium, Gluconacetobacter diazotrophicus, Haemophilus parainfluenzae, Haemophilus sputorum, Helicobacter canadensis, Helicobacter cinaedi, Helicobacter mustelae, Ilyobacler polytropus, Kingella kingae, Lactobacillus crispatus, Listeria ivanovii, Listeria monocytogenes, Listeriaceae bacterium, Methylocystis sp., Methylosinus trichosporium, Mobiluncus mulieris, Neisseria bacilliformis, Neisseria cinerea, Neisseria flavescens, Neisseria lactamica, Neisseria sp., Neisseria wadsworthii, Nitrosomonas sp., Parvibaculum lavamentivorans, Pasteurella multocida, Phascolarctobacterium succinatutens, Ralstonia syzygii, Rhodopseudomonas palustris, Rhodovulum sp., Simonsiella muelleri, Sphingomonas sp., Sporolactobacillus vineae, Staphylococcus lugdunensis, Streptococcus sp., Subdoligranulum sp., Tislrella mobilis, Treponema sp., or Verminephrobacter eiseniae.

[0440] A Cas9 molecule, as that term is used herein, refers to a molecule that can interact with a gRNA molecule (e.g., sequence of a domain of a tracr) and, in concert with the gRNA molecule, localize (e.g., target or home) to a site which comprises a target sequence and PAM sequence.

[0441] In embodiments, the ability of an active Cas9 molecule to interact with and cleave a target nucleic acid is PAM sequence dependent. A PAM sequence is a sequence in the target nucleic acid. In an embodiment, cleavage of the target nucleic acid occurs upstream from the PAM sequence. Active Cas9 molecules from different bacterial species can recognize different sequence motifs (e.g., PAM sequences). In an embodiment, an active Cas9 molecule of S. pyogenes recognizes the sequence motif NGG and directs cleavage of a target nucleic acid sequence 1 to 10, e.g., 3 to 5, base pairs upstream from that sequence. See, e.g., Mali el al, SCIENCE 2013; 339(6121): 823-826. In an embodiment, an active Cas9 molecule of S. thermophilus recognizes the sequence motif NGGNG and NNAGAAW (W=A or T) and directs cleavage of a core target nucleic acid sequence 1 to 10, e.g., 3 to 5, base pairs upstream from these sequences. See, e.g., Horvath et al., SCIENCE 2010; 327(5962): 167-170, and Deveau et al, J BACTERIOL 2008; 190(4): 1390-1400. In an embodiment, an active Cas9 molecule of S. mutans recognizes the sequence motif NGG or NAAR (R-A or G) and directs cleavage of a core target nucleic acid sequence 1 to 10, e.g., 3 to 5 base pairs, upstream from this sequence. See, e.g., Deveau et al., J BACTERIOL 2008; 190(4): 1390-1400.

[0442] In an embodiment, an active Cas9 molecule of S. aureus recognizes the sequence motif NNGRR (R=A or G) and directs cleavage of a target nucleic acid sequence 1 to 10, e.g., 3 to 5, base pairs upstream from that sequence. See, e.g., Ran F. et al., NATURE, vol. 520, 2015, pp. 186-191. In an embodiment, an active Cas9 molecule of N. meningitidis recognizes the sequence motif NNNNGATT and directs cleavage of a target nucleic acid sequence 1 to 10, e.g., 3 to 5, base pairs upstream from that sequence. See, e.g., Hou et al., PNAS EARLY EDITION 2013, 1-6. The ability of a Cas9 molecule to recognize a PAM sequence can be determined, e.g., using a transformation assay described in Jinek et al, SCIENCE 2012, 337:816.

[0443] Exemplary naturally occurring Cas9 molecules are described in Chylinski et al, RNA Biology 2013; 10:5, 727-737. Such Cas9 molecules include Cas9 molecules of a cluster 1 bacterial family, cluster 2 bacterial family, cluster 3 bacterial family, cluster 4 bacterial family, cluster 5 bacterial family, cluster 6 bacterial family, a cluster 7 bacterial family, a cluster 8 bacterial family, a cluster 9 bacterial family, a cluster 10 bacterial family, a cluster 11 bacterial family, a cluster 12 bacterial family, a cluster 13 bacterial family, a cluster 14 bacterial family, a cluster 1 bacterial family, a cluster 16 bacterial family, a cluster 17 bacterial family, a cluster 18 bacterial family, a cluster 19 bacterial family, a cluster 20 bacterial family, a cluster 21 bacterial family, a cluster 22 bacterial family, a cluster 23 bacterial family, a cluster 24 bacterial family, a cluster 25 bacterial family, a cluster 26 bacterial family, a cluster 27 bacterial family, a cluster 28 bacterial family, a cluster 29 bacterial family, a cluster 30 bacterial family, a cluster 31 bacterial family, a cluster 32 bacterial family, a cluster 33 bacterial family, a cluster 34 bacterial family, a cluster 35 bacterial family, a cluster 36 bacterial family, a cluster 37 bacterial family, a cluster 38 bacterial family, a cluster 39 bacterial family, a cluster 40 bacterial family, a cluster 41 bacterial family, a cluster 42 bacterial family, a cluster 43 bacterial family, a cluster 44 bacterial family, a cluster 45 bacterial family, a cluster 46 bacterial family, a cluster 47 bacterial family, a cluster 48 bacterial family, a cluster 49 bacterial family, a cluster 50 bacterial family, a cluster 51 bacterial family, a cluster 52 bacterial family, a cluster 53 bacterial family, a cluster 54 bacterial family, a cluster 55 bacterial family, a cluster 56 bacterial family, a cluster 57 bacterial family, a cluster 58 bacterial family, a cluster 59 bacterial family, a cluster 60 bacterial family, a cluster 61 bacterial family, a cluster 62 bacterial family, a cluster 63 bacterial family, a cluster 64 bacterial family, a cluster 65 bacterial family, a cluster 66 bacterial family, a cluster 67 bacterial family, a cluster 68 bacterial family, a cluster 69 bacterial family, a cluster 70 bacterial family, a cluster 71 bacterial family, a cluster 72 bacterial family, a cluster 73 bacterial family, a cluster 74 bacterial family, a cluster 75 bacterial family, a cluster 76 bacterial family, a cluster 77 bacterial family, or a cluster 78 bacterial family.

[0444] Exemplary naturally occurring Cas9 molecules include a Cas9 molecule of a cluster 1 bacterial family. Examples include a Cas9 molecule of: S. pyogenes (e.g., strain SF370, MGAS 10270, MGAS 10750, MGAS2096, MGAS315, MGAS5005, MGAS6180, MGAS9429, NZ131 and SSI-1), S. thermophilus (e.g., strain LMD-9), S. pseudoporcinus (e.g., strain SPIN 20026), S. mutans (e.g., strain UA 159, NN2025), S. macacae (e.g., strain NCTC1 1558), S. gallolylicus (e.g., strain UCN34, ATCC BAA-2069), S. equines (e.g., strain ATCC 9812, MGCS 124), S. dysdalactiae (e.g., strain GGS 124), S. bovis (e.g., strain ATCC 700338), S. cmginosus (e.g.; strain F021 1), S. agalactia (e.g., strain NEM316, A909), Listeria monocytogenes (e.g., strain F6854), Listeria innocua (L. innocua, e.g., strain Clip 11262), Enterococcus italicus (e.g., strain DSM 15952), or Enterococcus faecium (e.g., strain 1,23,408). Additional exemplary Cas9 molecules are a Cas9 molecule of Neisseria meningitidis (Hou et al. PNAS Early Edition 2013, 1-6) and a S. aureus Cas9 molecule.

[0445] In an embodiment, a Cas9 molecule, e.g., an active Cas9 molecule or inactive Cas9 molecule, comprises an amino acid sequence: having 60%, 65%, 70%, 75%, 80%, 85%, 90%, 95%, 96%, 97%, 98%, or 99% homology with; differs at no more than 1%, 2%, 5%, 10%, 15%, 20%, 30%, or 40% of the amino acid residues when compared with; differs by at least 1, 2, 5, 10 or 20 amino acids but by no more than 100, 80, 70, 60, 50, 40 or 30 amino acids from; or is identical to; any Cas9 molecule sequence described herein or a naturally occurring Cas9 molecule sequence, e.g., a Cas9 molecule from a species listed herein or described in Chylinski et al., RNA Biology 2013, 10:5, ′I2I-T,1 Hou et al. PNAS Early Edition 2013, 1-6.

[0446] In an embodiment, a Cas9 molecule comprises an amino acid sequence having 60%, 65%, 70%, 75%, 80%, 85%, 90%, 95%, 96%, 97%, 98%, or 99% homology with; differs at no more than 1%, 2%, 5%, 10%, 15%, 20%, 30%, or 40% of the amino acid residues when compared with; differs by at least 1, 2, 5, 10 or 20 amino acids but by no more than 100, 80, 70, 60, 50, 40 or 30 amino acids from; or is identical to; S. pyogenes Cas9 (UniProt Q99ZW2). In embodiments, the Cas9 molecule is a S. pyogenes Cas9 variant, such as a variant described in Slaymaker et al., Science Express, available online Dec. 1, 2015 at Science DOI: 10.1126/science.aad5227; Kleinstiver et al., Nature, 529, 2016, pp. 490-495, available online Jan. 6, 2016 at doi: 10.1038/nature16526; or US2016/0102324, the contents of which are incorporated herein in their entirety. In an embodiment, the Cas9 molecule is catalytically inactive, e.g., dCas9. Tsai et al. (2014), Nat. Biotech. 32:569-577; U.S. Pat. Nos. 8,871,445; 8,865,406; 8,795,965; 8,771,945; and 8,697,359, the contents of which are hereby incorporated by reference in their entirety. A catalytically inactive Cas9, e.g., dCas9, molecule may be fused with a transcription modulator, e.g., a transcription repressor or transcription activator.

[0447] In embodiments, the Cas9 molecule, e.g, a Cas9 of S. pyogenes, may additionally comprise one or more amino acid sequences that confer additional activity. In some aspects, the Cas9 molecule may comprise one or more nuclear localization sequences (NLSs), such as at least 1, 2, 3, 4, 5, 6, 7, 8, 9, 10, or more NLSs. Typically, an NLS consists of one or more short sequences of positively charged lysines or arginines exposed on the protein surface, but other types of NLS are known. Non-limiting examples of NLSs include an NLS sequence comprising or derived from: the NLS of the SV40 virus large T-antigen, having the amino acid sequence PKKKRKV (SEQ ID NO: 864). Other suitable NLS sequences are known in the art (e.g., Sorokin, Biochemistry (Moscow) (2007) 72:13, 1439-1457; Lange J Biol Chem. (2007) 282:8, 5101-5). In any of the aforementioned embodiments, the Cas9 molecule may additionally (or alternatively) comprise a tag, e.g., a His tag, e.g., a His(6) tag (SEQ ID NO: 865) or His(8) tag (SEQ ID NO: 866), e.g., at the N terminus and/or the C terminus.

[0448] Thus, engineered CRISPR gene editing systems, e.g., for gene editing in eukaryotic cells, typically involve (1) a guide RNA molecule (gRNA) comprising a targeting domain (which is capable of hybridizing to the genomic DNA target sequence), and sequence which is capable of binding to a Cas, e.g., Cas9 enzyme, and (2) a Cas, e.g., Cas9, protein. This second domain may comprise a domain referred to as a tracr domain. The targeting domain and the sequence which is capable of binding to a Cas, e.g., Cas9 enzyme, may be disposed on the same (sometimes referred to as a single gRNA, chimeric gRNA or sgRNA) or different molecules (sometimes referred to as a dual guide RNA, dual gRNA or dgRNA). If disposed on different molecules, each includes a hybridization domain which allows the molecules to associate, e.g., through hybridization.

[0449] gRNA molecule formats are known in the art. An exemplary gRNA molecule, e.g., dgRNA molecule, of the present invention comprises, e.g., consists of, a first nucleic acid having the sequence:

(SEQ ID NO: 867)
nnnnnnnnnnnnnnnnnnnnGUUUUAGAGCUAUGCUGUUUUG,

[0450] where the “n” 's refer to the residues of the targeting domain, e.g., a targeting domain to KDM1A, e.g., as described herein, and may consist of 15-25 nucleotides, e.g., consists of 20 nucleotides; and a second nucleic acid sequence having the exemplary sequence:

(SEQ ID NO: 868)
AACUUACCAAGGAACAGCAUAGCAAGUUAAAAUAAGGCUAGUCCGUUAU
CAACUUGAAAAAGUGGCACCGAGUCGGUGC, optionally with 1,
2, 3, 4, 5, 6, or 7 (e.g., 4 or 7, e.g., 7)
additional U nucleotides at the 3′ end.

[0451] The second nucleic acid molecule may alternatively consist of a fragment of the sequence above, wherein such fragment is capable of hybridizing to the first nucleic acid. An example of such second nucleic acid molecule is:

(SEQ ID NO: 869)
AACAGCAUAGCAAGUUAAAAUAAGGCUAGUCCGUUAUCAACUUGAAAAA
GUGGCACCGAGUCGGUGC, optionally with 1, 2, 3, 4, 5,
6, or 7 (e.g., 4 or 7, e.g., 7) additional U
nucleotides at the 3′ end.

[0452] Another exemplary gRNA molecule, e.g., a sgRNA molecule, of the present invention comprises, e.g., consists of a first nucleic acid having the sequence:

(SEQ ID NO: 870)
nnnnnnnnnnnnnnnnnnnGUUUUAGAGCUAGAAAUAGCAAGUUAAAAU
AAGGCUAGUCCGUUAUCAACUUGAAAAAGUGGCACCGAGUCGGUGC,

where the “n” 's refer to the residues of the targeting domain, e.g., a targeting domain to KDM1A, e.g., as described herein, and may consist of 15-25 nucleotides, e.g., consist of 20 nucleotides, optionally with 1, 2, 3, 4, 5, 6, or 7 (e.g., 4 or 7, e.g., 4) additional U nucleotides at the 3′ end.

[0453] Exemplary sequences of gRNA molecule targeting domains useful in the present invention (e.g., which target an LSD1 gene, e.g., KDM1A) are provided in Table 2.

[0454] Additional components and/or elements of CRISPR gene editing systems known in the art, e.g., are described in U.S. Publication No.2014/0068797, WO2015/048577, and Cong (2013) Science 339: 819-823, the contents of which are hereby incorporated by reference in their entirety. Such systems can be generated which inhibit a target gene, by, for example, engineering a CRISPR gene editing system to include a gRNA molecule comprising a targeting domain that hybridizes to a sequence of the target gene. In embodiments, the gRNA comprises a targeting domain which is fully complementarity to 15-25 nucleotides, e.g., 20 nucleotides, of a target gene, e.g., KDM1A or its regulatory elements. In embodiments, the 15-25 nucleotides, e.g., 20 nucleotides, of the target gene, are disposed immediately 5′ to a protospacer adjacent motif (PAM) sequence recognized by the RNA-guided nuclease, e.g., Cas protein, of the CRISPR gene editing system (e.g., where the system comprises a S. pyogenes Cas9 protein, the PAM sequence comprises NGG, where N can be any of A, T, G or C).

[0455] In embodiments, the gRNA molecule and RNA-guided nuclease, e.g., Cas protein, of the CRISPR gene editing system can be complexed to form a RNP complex. In other embodiments, nucleic acid encoding one or more components of the CRISPR gene editing system may be used.

[0456] In embodiments, foreign DNA can be introduced into the cell along with the CRISPR gene editing system, e.g., DNA encoding a desired transgene, with or without a promoter active in the target cell type. Depending on the sequences of the foreign DNA and target sequence of the genome, this process can be used to integrate the foreign DNA into the genome, at or near the site targeted by the CRISPR gene editing system. For example, 3′ and 5′ sequences flanking the transgene may be included in the foreign DNA which are homologous to the gene sequence 3′ and 5′ (respectively) of the site in the genome cut by the gene editing system. Such foreign DNA molecule can be referred to “template DNA.”

[0457] In an embodiment, the CRISPR gene editing system of the present invention comprises Cas9, e.g., S. pyogenes Cas9, and a gRNA comprising a targeting domain which hybridizes to a sequence of a gene of interest, e.g., KDM1A. In an embodiment, the gRNA and Cas9 are complexed to form a RNP. In an embodiment, the CRISPR gene editing system comprises nucleic acid encoding a gRNA and nucleic acid encoding a Cas protein, e.g., Cas9, e.g., S. pyogenes Cas9. In an embodiment, the CRISPR gene editing system comprises a gRNA and nucleic acid encoding a Cas protein, e.g., Cas9, e.g., S. pyogenes Cas9.

[0458] In an exemplary embodiment, the genome editing system LSD1 inhibitor is a CRISPR system. CRISPR genome editing systems useful in the practice of this invention are described in, for example, Artificial CRISPR/Cas systems can be generated which inhibit LSD1, using technology known in the art, e.g., that are described in U.S. Publication No. 20140068797, and Cong (2013) Science 339: 819-823. Other artificial CRISPR/Cas systems that are known in the art may also be generated which inhibit TCR and/or HLA, e.g., that described in Tsai (2014) Nature Biotechnol., 32:6 569-576, U.S. Pat. Nos. 8,871,445; 8,865,406; 8,795,965; 8,771,945; and 8,697,359.

TABLE 2
Exemplary LSD1 gRNA targeting domain sequences.

| | | SEQ |
|---|---|---|
| Target Gene | gRNA Targeting Domain Sequence | ID NO: |
| KDM1A | AGUGCGACAGGUUCGCUACA | 132 |
| KDM1A | UGGAAUAGCAGAGACUCCGG | 133 |
| KDM1A | CUAAAUAACUGUGAACUCGG | 134 |
| KDM1A | UGCUAUUCCAGUUUCCAUGG | 135 |
| KDM1A | CAGACCCAGGCACGACAGUA | 136 |
| KDM1A | UUUCUGAAACAGGAUCGUGU | 137 |
| KDM1A | UGAGAAGUCAUCCGGUCAUG | 138 |
| KDM1A | GAAUUGCAGACCAGUUUUUG | 139 |
| KDM1A | CGAGUUGCCACAUUUCGCAA | 140 |
| KDM1A | CUGAAACAGGAUCGUGUGGG | 141 |
| KDM1A | GGCGGCCCGAGAUGUUAUCU | 142 |
| KDM1A | UGUAUACCACACCUUGCAUA | 143 |
| KDM1A | AUGUAUACCACACCUUGCAU | 144 |
| KDM1A | UCUUAGUGAAAAGCAAACAC | 145 |
| KDM1A | GGGAUUUGGCAACCUUAACA | 146 |
| KDM1A | UUGUGCCACCUCUCCCUGAG | 147 |
| KDM1A | ACCAAGACCUGUUACCACCA | 148 |
| KDM1A | UCGGCAGUAAUAUCUCUGGG | 149 |
| KDM1A | GGAUCUGACCGCCCUAUGCA | 150 |
| KDM1A | CGUCAUGGUCUUAUCAACUU | 151 |
| KDM1A | UUCAAGACGACAGUUCUGGA | 152 |
| KDM1A | UGAAGUCUAGUUGAUGACUA | 153 |
| KDM1A | CACAGUUAUUUAGAGCGUCA | 154 |
| KDM1A | UGCCAACAGUAUUGGAGCUG | 155 |
| KDM1A | AGUGCCAACAGUAUUGGAGC | 156 |
| KDM1A | GCAUCUGUCUCACAUGCUUG | 157 |
| KDM1A | ACAUCUGCAGUCCAAAGGAU | 158 |
| KDM1A | GGCACAAACUGAACGGCUGG | 159 |
| KDM1A | GGUAAUUAUUAUAGGCUCUG | 160 |
| KDM1A | AAGAUGAGCAGAUUGAACAU | 161 |
| KDM1A | UGGCAGUACGACUGCCAGCA | 162 |
| KDM1A | CGCGGAGGCUCUUUCUUGCG | 163 |
| KDM1A | AUAAGUGACGAUGUGAUUGU | 164 |
| KDM1A | GGCAGUACGACUGCCAGCAG | 165 |
| KDM1A | GGAAAACAUCUGCAGUCCAA | 166 |
| KDM1A | UGCCCGAACAAAUUGACACU | 167 |
| KDM1A | ACUGAAUACAGCAGUGCGAC | 168 |
| KDM1A | CUGGCAGCCACCUGACAGUA | 169 |
| KDM1A | GCAGACCCAGGCACGACAGU | 170 |
| KDM1A | UUUGCUUUUCACUAAGAACU | 171 |
| KDM1A | GGGACACAGGCUUAUUAUUG | 172 |
| KDM1A | UGGCUACUCGUGUGUGCCUG | 173 |
| KDM1A | UCUCCCGCAAAGAAGAGUCG | 174 |
| KDM1A | AACAUCUGCAGUCCAAAGGA | 175 |
| KDM1A | CUUAGUGAAAAGCAAACACA | 176 |
| KDM1A | CCCAGGCACGACAGUAGGGC | 177 |
| KDM1A | GUCAAUUUGUUCGGGCAUGU | 178 |
| KDM1A | GAAUAAGAGCCCCGAGCCCA | 179 |
| KDM1A | CUGCUAUUCCAGUUUCCAUG | 180 |
| KDM1A | GAGAGGUGGCACAAACUGAA | 181 |
| KDM1A | AAGUGAGCCUGAAGAACCAU | 182 |
| KDM1A | UUUGCUUUCUUCGUUAGGUG | 183 |
| KDM1A | AUUUCUGAAACAGGAUCGUG | 184 |
| KDM1A | ACGACAGUAGGGCCGGCCUG | 185 |
| KDM1A | GUCCGUUGGCUUCAUAAAGU | 186 |
| KDM1A | AUACCACACCUUGCAUAGGG | 187 |
| KDM1A | GCUCUAAAUAACUGUGAACU | 188 |
| KDM1A | AGGAGGGAAUCCUAUGGCUG | 189 |
| KDM1A | AUAAAUAAAGGUUUGACUCG | 190 |
| KDM1A | AGCUGAUCUUGGAGCCAUGG | 191 |
| KDM1A | UAAAGGUUUGACUCGUGGAG | 192 |
| KDM1A | UGGACCACAACAGACCCAGA | 193 |
| KDM1A | GAUGAAUUAGCUGAAACACA | 194 |
| KDM1A | AGUAGCCAUUCCUUACUGUC | 195 |
| KDM1A | CUGGCGAGGCAGCGUAUACA | 196 |
| KDM1A | GUUUUCCACUCAGGGAGAGG | 197 |
| KDM1A | CGGAACCGCCGGGGUCCGCA | 198 |
| KDM1A | AGUGAGCCUGAAGAACCAUC | 199 |
| KDM1A | UCAACUUCGGCAUCUAUAAG | 200 |
| KDM1A | GUGGGGCACCUGGAAUCGAG | 201 |
| KDM1A | GGAAUAGCAGAGACUCCGGA | 202 |
| KDM1A | AGCCACCUGACAGUAAGGAA | 203 |
| KDM1A | AUAGUUUCCUUUGCGAAAUG | 204 |
| KDM1A | AGUUGGAAGCGAAUCCCCCA | 205 |
| KDM1A | AUGGCUCAGCCAAUCACUCC | 206 |
| KDM1A | AGCGGCAGCAACCGGGACGG | 207 |
| KDM1A | CUUUUAGCCCAAAGAAACUG | 208 |
| KDM1A | AAGAUGUAGCUUCUAGCAAC | 209 |
| KDM1A | AAUAAUACUCAUCUUCUGAG | 210 |
| KDM1A | CCGGCCCUACUGUCGUGCCU | 211 |
| KDM1A | CUGCUUCUUGAGAAGUCAUC | 212 |
| KDM1A | AGAGCCGACUUCCUCAUGAC | 213 |
| KDM1A | AGGCCUUCUGCUAAAGCCAC | 214 |
| KDM1A | GAAUGACAACUUCCAAUGCC | 215 |
| KDM1A | UGGUUAAAAGGACACUGUCA | 216 |
| KDM1A | UGCUGCUUCAGCACACCCAG | 217 |
| KDM1A | CCGCAAGAAAGAGCCUCCGC | 218 |
| KDM1A | AACUUCCAAUGCCUGGCCAA | 219 |
| KDM1A | AAAGGUUUGACUCGUGGAGC | 220 |
| KDM1A | GUGCCAACAGUAUUGGAGCU | 221 |
| KDM1A | UCAUCCGGUCAUGAGGAAGU | 222 |
| KDM1A | GCCACUAGUGCCAACAGUAU | 223 |
| KDM1A | UAGGGCAAGCUACCUUGUUA | 224 |
| KDM1A | GAUGCCUGGCCAUUCUCAAA | 225 |
| KDM1A | CAACUCUCUCCCUUAAGCAC | 226 |
| KDM1A | UGUUUUCCAGAUAUUAUCAG | 227 |
| KDM1A | CUUCAAGACGACAGUUCUGG | 228 |
| KDM1A | GAUUCCACGACUCUUCUUUG | 229 |
| KDM1A | AUGCAUCUGUCUCACAUGCU | 230 |
| KDM1A | AACUCUCUCCCUUAAGCACU | 231 |
| KDM1A | UCGACUUACAGCUUGUCCGU | 232 |
| KDM1A | UGGUAGCAGUGCAGUACCUC | 233 |
| KDM1A | AGGAGGUCCUUACUUGGUAG | 234 |
| KDM1A | AUAGGUAGAGUACAGAGAGA | 235 |
| KDM1A | GCACUGUGGCUGGGUAGUUA | 236 |
| KDM1A | UUUUCUAGGAGGGAAUCCUA | 237 |
| KDM1A | CGGACCCCGGCGGUUCCGCC | 238 |
| KDM1A | UGCCCACUUUAUGAAGCCAA | 239 |
| KDM1A | GAGCACCAUGCACUGUGGCU | 240 |
| KDM1A | GCAAAGAAGAGUCGUGGAAU | 241 |
| KDM1A | CUCCCUUAAGCACUGGGAUC | 242 |
| KDM1A | AGAUGAUCCUGCAGCAACAU | 243 |
| KDM1A | CCCGCGGAGGCUCUUUCUUG | 244 |
| KDM1A | UCUGCUAUUCCAGUUUCCAU | 245 |
| KDM1A | UGUGGUCCACUGAUAAUAUC | 246 |
| KDM1A | AAUUGCAGACCAGUUUUUGG | 247 |
| KDM1A | UUUAGCUAAAAAGACAGGAA | 248 |
| KDM1A | ACAGCAGGCGGCUCCGAGAA | 249 |
| KDM1A | AUGUCACACUUUUGGAAGCC | 250 |
| KDM1A | UUCUUCCCAGAUAACAUCUC | 251 |
| KDM1A | UCGUUGGCGUGCUGAUCCCU | 252 |
| KDM1A | GCUGAGUGGGCUGCGAGAAG | 253 |
| KDM1A | UCGGACCAGCCGGCGCAAGC | 254 |
| KDM1A | CAUGUAUACGCUGCCUCGCC | 255 |
| KDM1A | GGUUCCGCCAGGCCCCCGGG | 256 |
| KDM1A | UGUGAUUGUUGGCCGAUGCC | 257 |
| KDM1A | AGCCAUUCCUUACUGUCAGG | 258 |
| KDM1A | AAUAAUAAGCCUGUGUCCCU | 259 |
| KDM1A | UCCAAUACUGUUGGCACUAG | 260 |
| KDM1A | UCCAUGGGGGUCGCAGACCC | 261 |
| KDM1A | GGUGGCACAAACUGAACGGC | 262 |
| KDM1A | AAAUCCCUUUGAGAAUGGCC | 263 |
| KDM1A | UGUAGCUGAUCUUGGAGCCA | 264 |
| KDM1A | UCUUAUUCCUAUGUUGCUGC | 265 |
| KDM1A | AACUGGAAUAGCAGAGACUC | 266 |
| KDM1A | UGCAGCGGCAGCAACCGGGA | 267 |
| KDM1A | UAUACAUGGCCCCCAAAAAC | 268 |
| KDM1A | AAUGCCUGGCCAAGGGACAC | 269 |
| KDM1A | AAGAAACUGUGGUGUCUCGU | 270 |
| KDM1A | UGAGGCCCUGCGGACCCCGG | 271 |
| KDM1A | UUUAAAUGCAGCUGCAGUUG | 272 |
| KDM1A | GUGUUUUGAUCGGGUGUUCU | 273 |
| KDM1A | GAUGAUGACUUUGAGUUCAC | 274 |
| KDM1A | AGGUAAUUAUUAUAGGCUCU | 275 |
| KDM1A | GGACUUCAAGACGACAGUUC | 276 |
| KDM1A | GGGGCCUGGCGGAACCGCCG | 277 |
| KDM1A | GAUGUUUUCCACUCAGGGAG | 278 |
| KDM1A | AUCCAAGUGUCAAUUUGUUC | 279 |
| KDM1A | AAUGCAGCUGCAGUUGUGGU | 280 |
| KDM1A | CAGCAGAGCACCAUGCACUG | 281 |
| KDM1A | CCUUCCACAGGGCAAGCAGG | 282 |
| KDM1A | CUGAGUGGGCUGCGAGAAGC | 283 |
| KDM1A | CUUUAUAGAGGUUCCAGAAG | 284 |
| KDM1A | AACUCGGCAGUAAUAUCUCU | 285 |
| KDM1A | ACAGUUACAAAGUUUUGGAA | 286 |
| KDM1A | CAACUUCCAAUGCCUGGCCA | 287 |
| KDM1A | ACUGCAGAUGUUUUCCACUC | 288 |
| KDM1A | AACUACCCAGCCACAGUGCA | 289 |
| KDM1A | CUCCGAGAACGGGUCUGAGG | 290 |
| KDM1A | AAAACCUUCUGGGUCUGUUG | 291 |
| KDM1A | UAUAAGGUGCUUCUAAUUGU | 292 |
| KDM1A | UGGGCAUUUUUGCUUGAUCU | 293 |
| KDM1A | UUCCCCAGCUCCAAUACUGU | 294 |
| KDM1A | CAGCAGGCGGCUCCGAGAAC | 295 |
| KDM1A | GGUUGCCAAAUCCCAUCCUU | 296 |
| KDM1A | GACGACAGUUCUGGAGGGUA | 297 |
| KDM1A | AUACUGUUGGCACUAGUGGC | 298 |
| KDM1A | CUUCAGCACACCCAGGGGAA | 299 |
| KDM1A | UGGUAGAGCAAGAGUUUAAC | 300 |
| KDM1A | CCCGCAAGAAAGAGCCUCCG | 301 |
| KDM1A | UGUGGGGCACCUGGAAUCGA | 302 |
| KDM1A | CGGCUCCGAGAACGGGUCUG | 303 |
| KDM1A | GUGCCUGUGGCUUUAGCAGA | 304 |
| KDM1A | UUGCCAGCUUCUCACCUGUG | 305 |
| KDM1A | GUUUGUUUUCCUUACCUUGG | 306 |
| KDM1A | CAGGUUCGCUACACGGCUUC | 307 |
| KDM1A | AACUCACCCGAUGGUUCUUC | 308 |
| KDM1A | GCUUUCUUCGUUAGGUGUGG | 309 |
| KDM1A | CAAACAAGUAAAUAUGGAAC | 310 |
| KDM1A | ACCCCCUCAAGCCCCACCUG | 311 |
| KDM1A | GCAGCAACCGGGACGGAGGC | 312 |
| KDM1A | AGGAGAAGCUGCUGGUAUCA | 313 |
| KDM1A | UGUUUGCUGACCACAGCCAU | 314 |
| KDM1A | AAAGAUUCAGCUGACAUUUG | 315 |
| KDM1A | UGUCCGUUGGCUUCAUAAAG | 316 |
| KDM1A | CUUGGAGCCAUGGUGGUAAC | 317 |
| KDM1A | AGUUCUGGAGGGUAUGGAGA | 318 |
| KDM1A | CCGCGGGCCUCGCCCCCCGG | 319 |
| KDM1A | CGGCGGCCCGAGAUGUUAUC | 320 |
| KDM1A | UUGCUUUUAGCUAAAAAGAC | 321 |
| KDM1A | GAAUAGCAGAGACUCCGGAG | 322 |
| KDM1A | UUACCUGAUCCCAGUGCUUA | 323 |
| KDM1A | CUGUGGGGCACCUGGAAUCG | 324 |
| KDM1A | CUGUCGGGCCCAGCCGAGGU | 325 |
| KDM1A | AGGGCCGGCCUGAGGCCCUG | 326 |
| KDM1A | CUGCAGAUGUUUUCCACUCA | 327 |
| KDM1A | GAUGUUAUCUGGGAAGAAGG | 328 |
| KDM1A | CUCUGCUAUUCCAGUUUCCA | 329 |
| KDM1A | GAAGGCAUUUACCUUUAUAG | 330 |
| KDM1A | GAAGAAGAUAGUGAAAACUC | 331 |
| KDM1A | GCCGGCCCUACUGUCGUGCC | 332 |
| KDM1A | GGUGGUGUUGUGUUUUGAUC | 333 |
| KDM1A | GCCUGGGUCUGCGACCCCCA | 334 |
| KDM1A | CUGUAUUCAGUUUAAUGUCU | 335 |
| KDM1A | GAACUCGGCAGUAAUAUCUC | 336 |
| KDM1A | CUUUCUUCGUUAGGUGUGGA | 337 |
| KDM1A | CUAGUGGCAGGAGAAGCUGC | 338 |
| KDM1A | CAGGAACACCUGGUGUGGCC | 339 |
| KDM1A | UGCGUCGCAUUUAUAAAUAA | 340 |
| KDM1A | CGAGAUGUUAUCUGGGAAGA | 341 |
| KDM1A | GCUCGACAGUUACAAAGUUU | 342 |
| KDM1A | CGAUGCCUGGCCAUUCUCAA | 343 |
| KDM1A | AAGUCCUCCUGCUUGCCCUG | 344 |
| KDM1A | GGCCACCUCAGACCCGUUCU | 345 |
| KDM1A | AUUGAAAGAACUUCUUAAUA | 346 |
| KDM1A | GCCAUGGUGGUAACAGGUCU | 347 |
| KDM1A | UAGGAGGUCCUUACUUGGUA | 348 |
| KDM1A | GGAAACUAUGUAGCUGAUCU | 349 |
| KDM1A | UUCCUCAGGUGGGGCUUGAG | 350 |
| KDM1A | CUCGAUUCCAGGUGCCCCAC | 351 |
| KDM1A | ACCAAAAAUCCCUUUGAGAA | 352 |
| KDM1A | GGGCCUGUCGGGCCCAGCCG | 353 |
| KDM1A | CGGUUCCGCCAGGCCCCCGG | 354 |
| KDM1A | AAGGUAAUUAUUAUAGGCUC | 355 |
| KDM1A | GUUCUCUGUACCCUUCCCCU | 356 |
| KDM1A | AUACUCAUCUUCUGAGAGGU | 357 |
| KDM1A | CGAGACACCACAGUUUCUUU | 358 |
| KDM1A | GGUCAGCAAACAAGUAAAUA | 359 |
| KDM1A | AGAAUUGCAGACCAGUUUUU | 360 |
| KDM1A | UGUGUUUUGAUCGGGUGUUC | 361 |
| KDM1A | GCUUCAGCACACCCAGGGGA | 362 |
| KDM1A | GUAGGAGGUCCUUACUUGGU | 363 |
| KDM1A | UUGGCAGUACGACUGCCAGC | 364 |
| KDM1A | GGAGAGAGUUGAGAGAGGUG | 365 |
| KDM1A | GUCGGACCAGCCGGCGCAAG | 366 |
| KDM1A | AGAAGAAAAACUUCAGGAGU | 367 |
| KDM1A | GCUGGCCCUGGGACAGCAGG | 368 |
| KDM1A | CAGAGAGAUGGAUGAAAGCU | 369 |
| KDM1A | UUAAGGGAGAGAGUUGAGAG | 370 |
| KDM1A | GGGGGCCUGGCGGAACCGCC | 371 |
| KDM1A | UACCUGAUCCCAGUGCUUAA | 372 |
| KDM1A | UGGGAAGAAGGCGGCAGCCG | 373 |
| KDM1A | GCUGGGCCCGACAGGCCCGC | 374 |
| KDM1A | CUCUUCUGGAACCUCUAUAA | 375 |
| KDM1A | ACUGAUAAUAUCUGGAAAAC | 376 |
| KDM1A | CGGAGGGGCGUCGGACCAGC | 377 |
| KDM1A | UGUCACACUUUUGGAAGCCA | 378 |
| KDM1A | GCGCAGCCCGCGGGCCUGUC | 379 |
| KDM1A | AUUCCACGACUCUUCUUUGC | 380 |
| KDM1A | AUGCUUCUUUGUAUUGCUGA | 381 |
| KDM1A | CUUUGAGAAUGGCCAGGCAU | 382 |
| KDM1A | AAGAAUUGCAGACCAGUUUU | 383 |
| KDM1A | CUGCCUCGCCAGGCCACACC | 384 |
| KDM1A | CUGUGCAGGAACACCUGGUG | 385 |
| KDM1A | GGAAUAAGAGCCCCGAGCCC | 386 |
| KDM1A | CCGGGACGGAGGCUGGCCCU | 387 |
| KDM1A | CGGAGCCGCCUGCUGUCCCA | 388 |
| KDM1A | CAGAGACUCCGGAGGGGCGU | 389 |
| KDM1A | CUGCUGCUUCAGCACACCCA | 390 |
| KDM1A | GUGCAUGGUGCUCUGCUGAG | 391 |
| KDM1A | ACAGGAAAGGUAAUUAUUAU | 392 |
| KDM1A | UUUCCUUCCACAGGGCAAGC | 393 |
| KDM1A | CAGCCGGCGCAAGCGGGCGA | 394 |
| KDM1A | UGCAUGGUGCUCUGCUGAGU | 395 |
| KDM1A | GCUGCUGCUUCAGCACACCC | 396 |
| KDM1A | UGUCGGGCCCAGCCGAGGUC | 397 |
| KDM1A | CGUGCUGAUCCCUGGGCUCG | 398 |
| KDM1A | GCGGUUCCGCCAGGCCCCCG | 399 |
| KDM1A | ACACACUACUUACUGUUAUA | 400 |
| KDM1A | UAAGCCUGUGUCCCUUGGCC | 401 |
| KDM1A | GCAGUCCAAAGGAUGGGAUU | 402 |
| KDM1A | GGCCCAGCCGAGGUCGGGCC | 403 |
| KDM1A | ACACCUGGUGUGGCCUGGCG | 404 |
| KDM1A | GAUCCAAGUGUCAAUUUGUU | 405 |
| KDM1A | UCAAAUGUCAGCUGAAUCUU | 406 |
| KDM1A | GGGCCCAGCCGAGGUCGGGC | 407 |
| KDM1A | CGACAGGCCCGCGGGCUGCG | 408 |
| KDM1A | GGUCAUGAGGAAGUCGGCUC | 409 |
| KDM1A | UCCGCGGGCCUCGCCCCCCG | 410 |
| KDM1A | CUCGUUGGCGUGCUGAUCCC | 411 |
| KDM1A | ACGAGACACCACAGUUUCUU | 412 |
| KDM1A | UGUGUCCCUUGGCCAGGCAU | 413 |
| KDM1A | GAGGAAGAGCUCACCCCUGC | 414 |
| KDM1A | CGGCUGCAGCGGCAGCAACC | 415 |
| KDM1A | AGUUCUCUGUACCCUUCCCC | 416 |
| KDM1A | CCGCGGAGGCUCUUUCUUGC | 417 |
| KDM1A | GAGAAAUGCCAAAGCAGAGA | 418 |
| KDM1A | GAAGAAGGCGGCAGCCGCGG | 419 |
| KDM1A | CCCCCGGCCCGACCUCGGCU | 420 |
| KDM1A | GGCUGGGCCCGACAGGCCCG | 421 |
| KDM1A | UCUGCGACCCCCAUGGAAAC | 422 |
| KDM1A | GCCUGAGGCCCUGCGGACCC | 423 |
| KDM1A | AGGUGGUGUUGUGUUUUGAU | 424 |
| KDM1A | UUCAUUUUCUUCCUCAGGUG | 425 |
| KDM1A | UUACCUUCGCCCGCUUGCGC | 426 |
| KDM1A | GCCCAGCCGAGGUCGGGCCG | 427 |
| KDM1A | CCCAGGGCCAGCCUCCGUCC | 428 |
| KDM1A | CCGGGGGGCGAGGCCCGCGG | 429 |
| KDM1A | UCUUCCUCAGGUGGGGCUUG | 430 |
| KDM1A | CGACCUCGGCUGGGCCCGAC | 431 |
| KDM1A | UAUGGAGACGGCCAAGCAUC | 432 |
| KDM1A | UAUGUUGCUGCAGGAUCAUC | 433 |
| KDM1A | CUUCUUCCCAGAUAACAUCU | 434 |
| KDM1A | GCCAUUCUCAAAGGGAUUUU | 435 |
| KDM1A | GGCGUGCUGAUCCCUGGGCU | 436 |
| KDM1A | CUCGCCCCCCGGGGGCCUGG | 437 |
| KDM1A | GAGACAGACAAAUACUUGAU | 438 |
| KDM1A | GGGUCCGCAGGGCCUCAGGC | 439 |
| KDM1A | ACUCCUGGCCCCUCGAUUCC | 440 |
| KDM1A | CGCGCAGCCCGCGGGCCUGU | 441 |
| KDM1A | GUGCGCUCCCCCACCGCCCC | 442 |
| KDM1A | CUUUCAUUUUCUUCCUCAGG | 443 |
| KDM1A | GAGGCUGGCCCUGGGACAGC | 444 |
| KDM1A | UGCCACCCUCACCUGAUGCU | 445 |
| KDM1A | GAGGUGGCCGCGCAGCCCGC | 446 |
| KDM1A | UUUCAUUUUCUUCCUCAGGU | 447 |
| KDM1A | AUCGAGGGGCCAGGAGUGAU | 448 |
| KDM1A | CGGCUGGUCCGACGCCCCUC | 449 |
| KDM1A | CGGGGGCCUGGCGGAACCGC | 450 |
| KDM1A | CUUCUCACCUGUGGGGCACC | 451 |
| KDM1A | AGGUCGGGCCGGGGGCGGUG | 452 |
| KDM1A | CGCUGCAGCCGCCGCCGCCG | 453 |
| KDM1A | AGAGCACCAUGCACUGUGGC | 454 |
| KDM1A | CCCAGCCGAGGUCGGGCCGG | 455 |
| KDM1A | GACUGCUGUGCAGGAACACC | 456 |
| KDM1A | AGGCUCUGGGGUCUCAGGCU | 457 |
| KDM1A | UGAGGUGGCCGCGCAGCCCG | 458 |
| KDM1A | GCGUGCUGAUCCCUGGGCUC | 459 |
| KDM1A | CUUCGCCCGCUUGCGCCGGC | 460 |
| KDM1A | GCACCUGGAAUCGAGGGGCC | 461 |
| KDM1A | UCCUAAAGAGAAAGAUGAAA | 462 |
| KDM1A | AUGCUUGGGGACUGCUGUGC | 463 |
| KDM1A | AAUGAAAAGAAAAACCUUCU | 464 |
| KDM1A | GCGGAACCGCCGGGGUCCGC | 465 |
| KDM1A | GAGGUCGGGCCGGGGGCGGU | 466 |
| KDM1A | AUUAUAGGCUCUGGGGUCUC | 467 |
| KDM1A | UCACUUUCAUUUUCUUCCUC | 468 |
| KDM1A | UCGGAGCCGCCUGCUGUCCC | 469 |
| KDM1A | AGCCGAGGUCGGGCCGGGGG | 470 |
| KDM1A | AAAGCUAGAAGAAAAACUUC | 471 |
| KDM1A | UCCUCAGGUGGGGCUUGAGG | 472 |
| KDM1A | CGGCGGUUCCGCCAGGCCCC | 473 |
| KDM1A | UGCAUCUGUCUCACAUGCUU | 474 |
| KDM1A | GGCGGUUCCGCCAGGCCCCC | 475 |
| KDM1A | ACCGGGACGGAGGCUGGCCC | 476 |
| KDM1A | CACCGCCCCCGGCCCGACCU | 477 |
| KDM1A | CGCCAGGCCCCCGGGGGGCG | 478 |
| KDM1A | GGGGUGAGCUCUUCCUCUUC | 479 |
| KDM1A | ACCAUUUCAUCUUUCUCUUU | 480 |
| KDM1A | GGCCUCGCCCCCCGGGGGCC | 481 |
| KDM1A | GCCCCCGGCCCGACCUCGGC | 482 |
| KDM1A | UGGGGCUUGAGGGGGUGGUG | 483 |
| KDM1A | GCCGGGGUCCGCAGGGCCUC | 484 |
| KDM1A | CUUCUUUUCCUUCUCUGCUU | 485 |
| KDM1A | CCUCCGCGGGCCUCGCCCCC | 486 |
| KDM1A | CUCCGCGGGCCUCGCCCCCC | 487 |
| KDM1A | GGUCGGGCCGGGGGCGGUGG | 488 |
| KDM1A | UGGAAUGGAUGUCACACUUU | 489 |
| KDM1A | CUUCCUCAGGUGGGGCUUGA | 490 |
| KDM1A | GUGGGGCUUGAGGGGGUGGU | 491 |
| KDM1A | GCGGCUGCAGCGGCAGCAAC | 492 |
| KDM1A | CCCCCGGGGGGCGAGGCCCG | 493 |
| KDM1A | UAAUGAAAAGAAAAACCUUC | 494 |
| KDM1A | CGCGGCGGCGGCGGCUGCAG | 495 |
| KDM1A | UCAGGUGGGGCUUGAGGGGG | 496 |
| KDM1A | GGUGGGGCUUGAGGGGGUGG | 497 |
| KDM1A | UGGAAAUGACUAUGAUUUAA | 498 |
| KDM1A | GGGGCUUGAGGGGGUGGUGG | 499 |
| KDM1A | CGAGGUCGGGCCGGGGGCGG | 500 |
| KDM1A | GGCGGCAGCCGCGGCGGCGG | 501 |
| KDM1A | GAAGGCGGCAGCCGCGGCGG | 502 |
| KDM1A | AGUGCGACAGGUUCGCUACA | 503 |
| KDM1A | UGGAAUAGCAGAGACUCCGG | 504 |
| KDM1A | CUAAAUAACUGUGAACUCGG | 505 |
| KDM1A | UGCUAUUCCAGUUUCCAUGG | 506 |
| KDM1A | CAGACCCAGGCACGACAGUA | 507 |
| KDM1A | UUUCUGAAACAGGAUCGUGU | 508 |
| KDM1A | UGAGAAGUCAUCCGGUCAUG | 509 |
| KDM1A | GAAUUGCAGACCAGUUUUUG | 510 |
| KDM1A | CGAGUUGCCACAUUUCGCAA | 511 |
| KDM1A | CUGAAACAGGAUCGUGUGGG | 512 |
| KDM1A | GGCGGCCCGAGAUGUUAUCU | 513 |
| KDM1A | UGUAUACCACACCUUGCAUA | 514 |
| KDM1A | UCUUAGUGAAAAGCAAACAC | 515 |
| KDM1A | AUGUAUACCACACCUUGCAU | 516 |
| KDM1A | GGGAUUUGGCAACCUUAACA | 517 |
| KDM1A | UUGUGCCACCUCUCCCUGAG | 518 |
| KDM1A | GGAUCUGACCGCCCUAUGCA | 519 |
| KDM1A | ACCAAGACCUGUUACCACCA | 520 |
| KDM1A | CGUCAUGGUCUUAUCAACUU | 521 |
| KDM1A | UGAAGUCUAGUUGAUGACUA | 522 |
| KDM1A | CACAGUUAUUUAGAGCGUCA | 523 |
| KDM1A | UCGGCAGUAAUAUCUCUGGG | 524 |
| KDM1A | UGCCAACAGUAUUGGAGCUG | 525 |
| KDM1A | GCAUCUGUCUCACAUGCUUG | 526 |
| KDM1A | AGUGCCAACAGUAUUGGAGC | 527 |
| KDM1A | ACAUCUGCAGUCCAAAGGAU | 528 |
| KDM1A | GGCACAAACUGAACGGCUGG | 529 |
| KDM1A | UGGCAGUACGACUGCCAGCA | 530 |
| KDM1A | AAGAUGAGCAGAUUGAACAU | 531 |
| KDM1A | GGUAAUUAUUAUAGGCUCUG | 532 |
| KDM1A | CGCGGAGGCUCUUUCUUGCG | 533 |
| KDM1A | AUAAGUGACGAUGUGAUUGU | 534 |
| KDM1A | GGCAGUACGACUGCCAGCAG | 535 |
| KDM1A | UGCCCGAACAAAUUGACACU | 536 |
| KDM1A | GGAAAACAUCUGCAGUCCAA | 537 |
| KDM1A | ACUGAAUACAGCAGUGCGAC | 538 |
| KDM1A | UUUGCUUUUCACUAAGAACU | 539 |
| KDM1A | CUGGCAGCCACCUGACAGUA | 540 |
| KDM1A | GCAGACCCAGGCACGACAGU | 541 |
| KDM1A | GGGACACAGGCUUAUUAUUG | 542 |
| KDM1A | UGGCUACUCGUGUGUGCCUG | 543 |
| KDM1A | AACAUCUGCAGUCCAAAGGA | 544 |
| KDM1A | CCCAGGCACGACAGUAGGGC | 545 |
| KDM1A | CUUAGUGAAAAGCAAACACA | 546 |
| KDM1A | UCUCCCGCAAAGAAGAGUCG | 547 |
| KDM1A | GUCAAUUUGUUCGGGCAUGU | 548 |
| KDM1A | CUGCUAUUCCAGUUUCCAUG | 549 |
| KDM1A | GAAUAAGAGCCCCGAGCCCA | 550 |
| KDM1A | AAGUGAGCCUGAAGAACCAU | 551 |
| KDM1A | UUUGCUUUCUUCGUUAGGUG | 552 |
| KDM1A | AUUUCUGAAACAGGAUCGUG | 553 |
| KDM1A | GAGAGGUGGCACAAACUGAA | 554 |
| KDM1A | GUCCGUUGGCUUCAUAAAGU | 555 |
| KDM1A | ACGACAGUAGGGCCGGCCUG | 556 |
| KDM1A | AUACCACACCUUGCAUAGGG | 557 |
| KDM1A | GCUCUAAAUAACUGUGAACU | 558 |
| KDM1A | AGGAGGGAAUCCUAUGGCUG | 559 |
| KDM1A | AUAAAUAAAGGUUUGACUCG | 560 |
| KDM1A | CUGGCGAGGCAGCGUAUACA | 561 |
| KDM1A | AGCUGAUCUUGGAGCCAUGG | 562 |
| KDM1A | UAAAGGUUUGACUCGUGGAG | 563 |
| KDM1A | AGUAGCCAUUCCUUACUGUC | 564 |
| KDM1A | GUUUUCCACUCAGGGAGAGG | 565 |
| KDM1A | UGGACCACAACAGACCCAGA | 566 |
| KDM1A | GAUGAAUUAGCUGAAACACA | 567 |
| KDM1A | AGUGAGCCUGAAGAACCAUC | 568 |
| KDM1A | CGGAACCGCCGGGGUCCGCA | 569 |
| KDM1A | UCAACUUCGGCAUCUAUAAG | 570 |
| KDM1A | GUGGGGCACCUGGAAUCGAG | 571 |
| KDM1A | AUAGUUUCCUUUGCGAAAUG | 572 |
| KDM1A | GGAAUAGCAGAGACUCCGGA | 573 |
| KDM1A | AGCCACCUGACAGUAAGGAA | 574 |
| KDM1A | AUGGCUCAGCCAAUCACUCC | 575 |
| KDM1A | AGCGGCAGCAACCGGGACGG | 576 |
| KDM1A | AGUUGGAAGCGAAUCCCCCA | 577 |
| KDM1A | CUUUUAGCCCAAAGAAACUG | 578 |
| KDM1A | AAGAUGUAGCUUCUAGCAAC | 579 |
| KDM1A | CCGGCCCUACUGUCGUGCCU | 580 |
| KDM1A | AGAGCCGACUUCCUCAUGAC | 581 |
| KDM1A | AAUAAUACUCAUCUUCUGAG | 582 |
| KDM1A | CUGCUUCUUGAGAAGUCAUC | 583 |
| KDM1A | AGGCCUUCUGCUAAAGCCAC | 584 |
| KDM1A | GAAUGACAACUUCCAAUGCC | 585 |
| KDM1A | CCGCAAGAAAGAGCCUCCGC | 586 |
| KDM1A | UGCUGCUUCAGCACACCCAG | 587 |
| KDM1A | AACUUCCAAUGCCUGGCCAA | 588 |
| KDM1A | AAAGGUUUGACUCGUGGAGC | 589 |
| KDM1A | GUGCCAACAGUAUUGGAGCU | 590 |
| KDM1A | GCCACUAGUGCCAACAGUAU | 591 |
| KDM1A | UAGGGCAAGCUACCUUGUUA | 592 |
| KDM1A | CAACUCUCUCCCUUAAGCAC | 593 |
| KDM1A | UCAUCCGGUCAUGAGGAAGU | 594 |
| KDM1A | GAUGCCUGGCCAUUCUCAAA | 595 |
| KDM1A | UGUUUUCCAGAUAUUAUCAG | 596 |
| KDM1A | AUGCAUCUGUCUCACAUGCU | 597 |
| KDM1A | GAUUCCACGACUCUUCUUUG | 598 |
| KDM1A | UGGUAGCAGUGCAGUACCUC | 599 |
| KDM1A | AACUCUCUCCCUUAAGCACU | 600 |
| KDM1A | UCGACUUACAGCUUGUCCGU | 601 |
| KDM1A | AGGAGGUCCUUACUUGGUAG | 602 |
| KDM1A | GCACUGUGGCUGGGUAGUUA | 603 |
| KDM1A | AUAGGUAGAGUACAGAGAGA | 604 |
| KDM1A | CGGACCCCGGCGGUUCCGCC | 605 |
| KDM1A | UUUUCUAGGAGGGAAUCCUA | 606 |
| KDM1A | GAGCACCAUGCACUGUGGCU | 607 |
| KDM1A | UGCCCACUUUAUGAAGCCAA | 608 |
| KDM1A | CUCCCUUAAGCACUGGGAUC | 609 |
| KDM1A | GCAAAGAAGAGUCGUGGAAU | 610 |
| KDM1A | CCCGCGGAGGCUCUUUCUUG | 611 |
| KDM1A | AGAUGAUCCUGCAGCAACAU | 612 |
| KDM1A | AAUUGCAGACCAGUUUUUGG | 613 |
| KDM1A | UGUGGUCCACUGAUAAUAUC | 614 |
| KDM1A | UUUAGCUAAAAAGACAGGAA | 615 |
| KDM1A | UCUGCUAUUCCAGUUUCCAU | 616 |
| KDM1A | ACAGCAGGCGGCUCCGAGAA | 617 |
| KDM1A | AUGUCACACUUUUGGAAGCC | 618 |
| KDM1A | UUCUUCCCAGAUAACAUCUC | 619 |
| KDM1A | CAUGUAUACGCUGCCUCGCC | 620 |
| KDM1A | GCUGAGUGGGCUGCGAGAAG | 621 |
| KDM1A | UCGUUGGCGUGCUGAUCCCU | 622 |
| KDM1A | UCGGACCAGCCGGCGCAAGC | 623 |
| KDM1A | AGCCAUUCCUUACUGUCAGG | 624 |
| KDM1A | UGUGAUUGUUGGCCGAUGCC | 625 |
| KDM1A | AAUAAUAAGCCUGUGUCCCU | 626 |
| KDM1A | GGUUCCGCCAGGCCCCCGGG | 627 |
| KDM1A | UCCAAUACUGUUGGCACUAG | 628 |
| KDM1A | UGUAGCUGAUCUUGGAGCCA | 629 |
| KDM1A | UCCAUGGGGGUCGCAGACCC | 630 |
| KDM1A | AAAUCCCUUUGAGAAUGGCC | 631 |
| KDM1A | GGUGGCACAAACUGAACGGC | 632 |
| KDM1A | AACUGGAAUAGCAGAGACUC | 633 |
| KDM1A | UGCAGCGGCAGCAACCGGGA | 634 |
| KDM1A | UCUUAUUCCUAUGUUGCUGC | 635 |
| KDM1A | UAUACAUGGCCCCCAAAAAC | 636 |
| KDM1A | AAUGCCUGGCCAAGGGACAC | 637 |
| KDM1A | AAGAAACUGUGGUGUCUCGU | 638 |
| KDM1A | UUUAAAUGCAGCUGCAGUUG | 639 |
| KDM1A | UGAGGCCCUGCGGACCCCGG | 640 |
| KDM1A | AGGUAAUUAUUAUAGGCUCU | 641 |
| KDM1A | GUGUUUUGAUCGGGUGUUCU | 642 |
| KDM1A | GAUGAUGACUUUGAGUUCAC | 643 |
| KDM1A | AUCCAAGUGUCAAUUUGUUC | 644 |
| KDM1A | GGGGCCUGGCGGAACCGCCG | 645 |
| KDM1A | GAUGUUUUCCACUCAGGGAG | 646 |
| KDM1A | AAUGCAGCUGCAGUUGUGGU | 647 |
| KDM1A | CAGCAGAGCACCAUGCACUG | 648 |
| KDM1A | CUGAGUGGGCUGCGAGAAGC | 649 |
| KDM1A | CUUUAUAGAGGUUCCAGAAG | 650 |
| KDM1A | ACAGUUACAAAGUUUUGGAA | 651 |
| KDM1A | CAACUUCCAAUGCCUGGCCA | 652 |
| KDM1A | AACUCGGCAGUAAUAUCUCU | 653 |
| KDM1A | AACUACCCAGCCACAGUGCA | 654 |
| KDM1A | ACUGCAGAUGUUUUCCACUC | 655 |
| KDM1A | UAUAAGGUGCUUCUAAUUGU | 656 |
| KDM1A | CUCCGAGAACGGGUCUGAGG | 657 |
| KDM1A | AAAACCUUCUGGGUCUGUUG | 658 |
| KDM1A | UGGGCAUUUUUGCUUGAUCU | 659 |
| KDM1A | GGUUGCCAAAUCCCAUCCUU | 660 |
| KDM1A | CAGCAGGCGGCUCCGAGAAC | 661 |
| KDM1A | UUCCCCAGCUCCAAUACUGU | 662 |
| KDM1A | AUACUGUUGGCACUAGUGGC | 663 |
| KDM1A | CUUCAGCACACCCAGGGGAA | 664 |
| KDM1A | UGGUAGAGCAAGAGUUUAAC | 665 |
| KDM1A | CCCGCAAGAAAGAGCCUCCG | 666 |
| KDM1A | UGUGGGGCACCUGGAAUCGA | 667 |
| KDM1A | CGGCUCCGAGAACGGGUCUG | 668 |
| KDM1A | CAGGUUCGCUACACGGCUUC | 669 |
| KDM1A | UUGCCAGCUUCUCACCUGUG | 670 |
| KDM1A | GUUUGUUUUCCUUACCUUGG | 671 |
| KDM1A | GUGCCUGUGGCUUUAGCAGA | 672 |
| KDM1A | ACCCCCUCAAGCCCCACCUG | 673 |
| KDM1A | AACUCACCCGAUGGUUCUUC | 674 |
| KDM1A | GCUUUCUUCGUUAGGUGUGG | 675 |
| KDM1A | CAAACAAGUAAAUAUGGAAC | 676 |
| KDM1A | GCAGCAACCGGGACGGAGGC | 677 |
| KDM1A | AAAGAUUCAGCUGACAUUUG | 678 |
| KDM1A | UGUUUGCUGACCACAGCCAU | 679 |
| KDM1A | AGGAGAAGCUGCUGGUAUCA | 680 |
| KDM1A | UGUCCGUUGGCUUCAUAAAG | 681 |
| KDM1A | CUUGGAGCCAUGGUGGUAAC | 682 |
| KDM1A | CCGCGGGCCUCGCCCCCCGG | 683 |
| KDM1A | UUGCUUUUAGCUAAAAAGAC | 684 |
| KDM1A | CGGCGGCCCGAGAUGUUAUC | 685 |
| KDM1A | GAAUAGCAGAGACUCCGGAG | 686 |
| KDM1A | UUACCUGAUCCCAGUGCUUA | 687 |
| KDM1A | CUGUGGGGCACCUGGAAUCG | 688 |
| KDM1A | CUGUCGGGCCCAGCCGAGGU | 689 |
| KDM1A | AGGGCCGGCCUGAGGCCCUG | 690 |
| KDM1A | CUGCAGAUGUUUUCCACUCA | 691 |
| KDM1A | GAUGUUAUCUGGGAAGAAGG | 692 |
| KDM1A | GAAGGCAUUUACCUUUAUAG | 693 |
| KDM1A | CUCUGCUAUUCCAGUUUCCA | 694 |
| KDM1A | GAAGAAGAUAGUGAAAACUC | 695 |
| KDM1A | GCCGGCCCUACUGUCGUGCC | 696 |
| KDM1A | GGUGGUGUUGUGUUUUGAUC | 697 |
| KDM1A | CUGUAUUCAGUUUAAUGUCU | 698 |
| KDM1A | GCCUGGGUCUGCGACCCCCA | 699 |
| KDM1A | CUAGUGGCAGGAGAAGCUGC | 700 |
| KDM1A | GAACUCGGCAGUAAUAUCUC | 701 |
| KDM1A | CUUUCUUCGUUAGGUGUGGA | 702 |
| KDM1A | CAGGAACACCUGGUGUGGCC | 703 |
| KDM1A | UGCGUCGCAUUUAUAAAUAA | 704 |
| KDM1A | GCUCGACAGUUACAAAGUUU | 705 |
| KDM1A | CGAGAUGUUAUCUGGGAAGA | 706 |
| KDM1A | GGCCACCUCAGACCCGUUCU | 707 |
| KDM1A | CGAUGCCUGGCCAUUCUCAA | 708 |
| KDM1A | AUUGAAAGAACUUCUUAAUA | 709 |
| KDM1A | UAGGAGGUCCUUACUUGGUA | 710 |
| KDM1A | GCCAUGGUGGUAACAGGUCU | 711 |
| KDM1A | GGAAACUAUGUAGCUGAUCU | 712 |
| KDM1A | UUCCUCAGGUGGGGCUUGAG | 713 |
| KDM1A | CUCGAUUCCAGGUGCCCCAC | 714 |
| KDM1A | CGGUUCCGCCAGGCCCCCGG | 715 |
| KDM1A | ACCAAAAAUCCCUUUGAGAA | 716 |
| KDM1A | GUUCUCUGUACCCUUCCCCU | 717 |
| KDM1A | GGGCCUGUCGGGCCCAGCCG | 718 |
| KDM1A | AAGGUAAUUAUUAUAGGCUC | 719 |
| KDM1A | GGUCAGCAAACAAGUAAAUA | 720 |
| KDM1A | CGAGACACCACAGUUUCUUU | 721 |
| KDM1A | AGAAUUGCAGACCAGUUUUU | 722 |
| KDM1A | AUACUCAUCUUCUGAGAGGU | 723 |
| KDM1A | UGUGUUUUGAUCGGGUGUUC | 724 |
| KDM1A | GGAGAGAGUUGAGAGAGGUG | 725 |
| KDM1A | GCUUCAGCACACCCAGGGGA | 726 |
| KDM1A | GUAGGAGGUCCUUACUUGGU | 727 |
| KDM1A | GUCGGACCAGCCGGCGCAAG | 728 |
| KDM1A | UUGGCAGUACGACUGCCAGC | 729 |
| KDM1A | AGAAGAAAAACUUCAGGAGU | 730 |
| KDM1A | GCUGGCCCUGGGACAGCAGG | 731 |
| KDM1A | CAGAGAGAUGGAUGAAAGCU | 732 |
| KDM1A | UUAAGGGAGAGAGUUGAGAG | 733 |
| KDM1A | GGGGGCCUGGCGGAACCGCC | 734 |
| KDM1A | UACCUGAUCCCAGUGCUUAA | 735 |
| KDM1A | UGGGAAGAAGGCGGCAGCCG | 736 |
| KDM1A | UGUCACACUUUUGGAAGCCA | 737 |
| KDM1A | GCUGGGCCCGACAGGCCCGC | 738 |
| KDM1A | CUCUUCUGGAACCUCUAUAA | 739 |
| KDM1A | ACUGAUAAUAUCUGGAAAAC | 740 |
| KDM1A | CGGAGGGGCGUCGGACCAGC | 741 |
| KDM1A | CUUUGAGAAUGGCCAGGCAU | 742 |
| KDM1A | GCGCAGCCCGCGGGCCUGUC | 743 |
| KDM1A | AUUCCACGACUCUUCUUUGC | 744 |
| KDM1A | AUGCUUCUUUGUAUUGCUGA | 745 |
| KDM1A | AAGAAUUGCAGACCAGUUUU | 746 |
| KDM1A | CUGUGCAGGAACACCUGGUG | 747 |
| KDM1A | GGAAUAAGAGCCCCGAGCCC | 748 |
| KDM1A | CUGCCUCGCCAGGCCACACC | 749 |
| KDM1A | CCGGGACGGAGGCUGGCCCU | 750 |
| KDM1A | CAGAGACUCCGGAGGGGCGU | 751 |
| KDM1A | CGGAGCCGCCUGCUGUCCCA | 752 |
| KDM1A | GUGCAUGGUGCUCUGCUGAG | 753 |
| KDM1A | CUGCUGCUUCAGCACACCCA | 754 |
| KDM1A | ACAGGAAAGGUAAUUAUUAU | 755 |
| KDM1A | CAGCCGGCGCAAGCGGGCGA | 756 |
| KDM1A | UGCAUGGUGCUCUGCUGAGU | 757 |
| KDM1A | GCUGCUGCUUCAGCACACCC | 758 |
| KDM1A | UGUCGGGCCCAGCCGAGGUC | 759 |
| KDM1A | CGUGCUGAUCCCUGGGCUCG | 760 |
| KDM1A | GCGGUUCCGCCAGGCCCCCG | 761 |
| KDM1A | GCAGUCCAAAGGAUGGGAUU | 762 |
| KDM1A | ACACACUACUUACUGUUAUA | 763 |
| KDM1A | UAAGCCUGUGUCCCUUGGCC | 764 |
| KDM1A | GGCCCAGCCGAGGUCGGGCC | 765 |
| KDM1A | ACACCUGGUGUGGCCUGGCG | 766 |
| KDM1A | GAUCCAAGUGUCAAUUUGUU | 767 |
| KDM1A | UCAAAUGUCAGCUGAAUCUU | 768 |
| KDM1A | GGGCCCAGCCGAGGUCGGGC | 769 |
| KDM1A | CGACAGGCCCGCGGGCUGCG | 770 |
| KDM1A | GGUCAUGAGGAAGUCGGCUC | 771 |
| KDM1A | UCCGCGGGCCUCGCCCCCCG | 772 |
| KDM1A | CUCGUUGGCGUGCUGAUCCC | 773 |
| KDM1A | ACGAGACACCACAGUUUCUU | 774 |
| KDM1A | UGUGUCCCUUGGCCAGGCAU | 775 |
| KDM1A | CGGCUGCAGCGGCAGCAACC | 776 |
| KDM1A | GAGGAAGAGCUCACCCCUGC | 777 |
| KDM1A | AGUUCUCUGUACCCUUCCCC | 778 |
| KDM1A | CCGCGGAGGCUCUUUCUUGC | 779 |
| KDM1A | GAGAAAUGCCAAAGCAGAGA | 780 |
| KDM1A | CCCCCGGCCCGACCUCGGCU | 781 |
| KDM1A | GAAGAAGGCGGCAGCCGCGG | 782 |
| KDM1A | GGCUGGGCCCGACAGGCCCG | 783 |
| KDM1A | UCUGCGACCCCCAUGGAAAC | 784 |
| KDM1A | GCCUGAGGCCCUGCGGACCC | 785 |
| KDM1A | AGGUGGUGUUGUGUUUUGAU | 786 |
| KDM1A | UUCAUUUUCUUCCUCAGGUG | 787 |
| KDM1A | UUACCUUCGCCCGCUUGCGC | 788 |
| KDM1A | GCCCAGCCGAGGUCGGGCCG | 789 |
| KDM1A | CCGGGGGGCGAGGCCCGCGG | 790 |
| KDM1A | CCCAGGGCCAGCCUCCGUCC | 791 |
| KDM1A | UCUUCCUCAGGUGGGGCUUG | 792 |
| KDM1A | CGACCUCGGCUGGGCCCGAC | 793 |
| KDM1A | CUUCUUCCCAGAUAACAUCU | 794 |
| KDM1A | UAUGUUGCUGCAGGAUCAUC | 795 |
| KDM1A | CUCGCCCCCCGGGGGCCUGG | 796 |
| KDM1A | GCCAUUCUCAAAGGGAUUUU | 797 |
| KDM1A | GGCGUGCUGAUCCCUGGGCU | 798 |
| KDM1A | GAGACAGACAAAUACUUGAU | 799 |
| KDM1A | GGGUCCGCAGGGCCUCAGGC | 800 |
| KDM1A | ACUCCUGGCCCCUCGAUUCC | 801 |
| KDM1A | CGCGCAGCCCGCGGGCCUGU | 802 |
| KDM1A | CUUUCAUUUUCUUCCUCAGG | 803 |
| KDM1A | GUGCGCUCCCCCACCGCCCC | 804 |
| KDM1A | GAGGCUGGCCCUGGGACAGC | 805 |
| KDM1A | UUUCAUUUUCUUCCUCAGGU | 806 |
| KDM1A | CGGCUGGUCCGACGCCCCUC | 807 |
| KDM1A | AUCGAGGGGCCAGGAGUGAU | 808 |
| KDM1A | GAGGUGGCCGCGCAGCCCGC | 809 |
| KDM1A | CGGGGGCCUGGCGGAACCGC | 810 |
| KDM1A | CGCUGCAGCCGCCGCCGCCG | 811 |
| KDM1A | CUUCUCACCUGUGGGGCACC | 812 |
| KDM1A | AGGUCGGGCCGGGGGCGGUG | 813 |
| KDM1A | AGAGCACCAUGCACUGUGGC | 814 |
| KDM1A | GACUGCUGUGCAGGAACACC | 815 |
| KDM1A | AGGCUCUGGGGUCUCAGGCU | 816 |
| KDM1A | CCCAGCCGAGGUCGGGCCGG | 817 |
| KDM1A | UGAGGUGGCCGCGCAGCCCG | 818 |
| KDM1A | GCGUGCUGAUCCCUGGGCUC | 819 |
| KDM1A | GCACCUGGAAUCGAGGGGCC | 820 |
| KDM1A | CUUCGCCCGCUUGCGCCGGC | 821 |
| KDM1A | UCCUAAAGAGAAAGAUGAAA | 822 |
| KDM1A | AUGCUUGGGGACUGCUGUGC | 823 |
| KDM1A | AAUGAAAAGAAAAACCUUCU | 824 |
| KDM1A | GCGGAACCGCCGGGGUCCGC | 825 |
| KDM1A | GAGGUCGGGCCGGGGGCGGU | 826 |
| KDM1A | AUUAUAGGCUCUGGGGUCUC | 827 |
| KDM1A | UCACUUUCAUUUUCUUCCUC | 828 |
| KDM1A | UCGGAGCCGCCUGCUGUCCC | 829 |
| KDM1A | AGCCGAGGUCGGGCCGGGGG | 830 |
| KDM1A | AAAGCUAGAAGAAAAACUUC | 831 |
| KDM1A | UCCUCAGGUGGGGCUUGAGG | 832 |
| KDM1A | UGCAUCUGUCUCACAUGCUU | 833 |
| KDM1A | GGCGGUUCCGCCAGGCCCCC | 834 |
| KDM1A | CGGCGGUUCCGCCAGGCCCC | 835 |
| KDM1A | ACCGGGACGGAGGCUGGCCC | 836 |
| KDM1A | CACCGCCCCCGGCCCGACCU | 837 |
| KDM1A | GGGGUGAGCUCUUCCUCUUC | 838 |
| KDM1A | CGCCAGGCCCCCGGGGGGCG | 839 |
| KDM1A | ACCAUUUCAUCUUUCUCUUU | 840 |
| KDM1A | GGCCUCGCCCCCCGGGGGCC | 841 |
| KDM1A | UGGGGCUUGAGGGGGUGGUG | 842 |
| KDM1A | GCCGGGGUCCGCAGGGCCUC | 843 |
| KDM1A | GCCCCCGGCCCGACCUCGGC | 844 |
| KDM1A | CUUCUUUUCCUUCUCUGCUU | 845 |
| KDM1A | CCUCCGCGGGCCUCGCCCCC | 846 |
| KDM1A | GGUCGGGCCGGGGGCGGUGG | 847 |
| KDM1A | CUCCGCGGGCCUCGCCCCCC | 848 |
| KDM1A | UGGAAUGGAUGUCACACUUU | 849 |
| KDM1A | CUUCCUCAGGUGGGGCUUGA | 850 |
| KDM1A | GUGGGGCUUGAGGGGGUGGU | 851 |
| KDM1A | GCGGCUGCAGCGGCAGCAAC | 852 |
| KDM1A | CCCCCGGGGGGCGAGGCCCG | 853 |
| KDM1A | UAAUGAAAAGAAAAACCUUC | 854 |
| KDM1A | CGCGGCGGCGGCGGCUGCAG | 855 |
| KDM1A | UCAGGUGGGGCUUGAGGGGG | 856 |
| KDM1A | GGUGGGGCUUGAGGGGGUGG | 857 |
| KDM1A | UGGAAAUGACUAUGAUUUAA | 858 |
| KDM1A | GGGGCUUGAGGGGGUGGUGG | 859 |
| KDM1A | CGAGGUCGGGCCGGGGGCGG | 860 |
| KDM1A | GGCGGCAGCCGCGGCGGCGG | 861 |
| KDM1A | GAAGGCGGCAGCCGCGGCGG | 862 |

### TALEN Gene Editing Systems

[0459] TALENs are produced artificially by fusing a TAL effector DNA binding domain to a DNA cleavage domain. Transcription activator-like effects (TALEs) can be engineered to bind any desired DNA sequence, e.g., a target gene. By combining an engineered TALE with a DNA cleavage domain, a restriction enzyme can be produced which is specific to any desired DNA sequence. These can then be used, for example, as components of gene editing systems, e.g., TALEN gene editing systems, by for example, being introduced into a cell, wherein they can be used for genome editing. Boch (2011) Nature Biotech. 29: 135-6; and Boch et al. (2009) Science 326: 1509-12; Moscou et al. (2009) Science 326: 3501.

[0460] TALEs are proteins secreted by Xanthomonas bacteria. The DNA binding domain contains a repeated, highly conserved 33-34 amino acid sequence, with the exception of the 12th and 13th amino acids. These two positions are highly variable, showing a strong correlation with specific nucleotide recognition. They can thus be engineered to bind to a desired DNA sequence.

[0461] To produce a TALEN, a TALE protein is fused to a nuclease (N), which is, for example, a wild-type or mutated FokI endonuclease. Several mutations to FokI have been made for its use in TALENs; these, for example, improve cleavage specificity or activity. Cermak et al. (2011) Nucl. Acids Res. 39: e82; Miller et al. (2011) Nature Biotech. 29: 143-8; Hockemeyer et al. (2011) Nature Biotech. 29: 731-734; Wood et al. (2011) Science 333: 307; Doyon et al. (2010) Nature Methods 8: 74-79; Szczepek et al. (2007) Nature Biotech. 25: 786-793; and Guo et al. (2010) J. Mol. Biol. 200: 96.

[0462] The FokI domain functions as a dimer, requiring two constructs with unique DNA binding domains for sites in the target genome with proper orientation and spacing. Both the number of amino acid residues between the TALE DNA binding domain and the FokI cleavage domain and the number of bases between the two individual TALEN binding sites appear to be important parameters for achieving high levels of activity. Miller et al. (2011) Nature Biotech. 29: 143-8.

[0463] A TALEN (or pair of TALENs) can be used inside a cell to produce a double-stranded break (DSB). A mutation can be introduced at the break site if the repair mechanisms improperly repair the break via non-homologous end joining. For example, improper repair may introduce a frame shift mutation. Alternatively, foreign DNA can be introduced into the cell along with the TALEN, e.g., DNA encoding a transgene, and depending on the sequences of the foreign DNA and chromosomal sequence, this process can be used to integrate the transgene at or near the site targeted by the TALEN. TALENs specific to a target gene, e.g., LSD1, can be constructed using any method known in the art, including various schemes using modular components. Zhang et al. (2011) Nature Biotech. 29: 149-53; Geibler et al. (2011) PLoS ONE 6: e19509; U.S. Pat. Nos. 8,420,782; 8,470,973, the contents of which are hereby incorporated by reference in their entirety.

[0464] Thus, in exemplary embodiments, the genome editing system LSD1 inhibitor is a TALEN gene editing system directed to a sequence of an LSD1 gene, e.g., KDM1A. Such systems are known generally in the art and TALEN genome editing systems specific for LSD1 can be generated using known methods. See, e.g., Boch (2011) Nature Biotech. 29: 135-6; and Boch et al. (2009) Science 326: 1509-12; Moscou et al. (2009) Science 326: 3501; Zhang et al. (2011) Nature Biotech. 29: 149-53; Geibler et al. (2011) PLoS ONE 6: e19509; U.S. Pat. Nos. 8,420,782; 8,470,973.

### Zinc Finger Nuclease (ZFN) Gene Editing Systems

[0465] “ZFN” or “Zinc Finger Nuclease” refer to a zinc finger nuclease, an artificial nuclease or pair of nucleases which can be used, e.g., as part of a ZFN gene editing system to modify, e.g., insert or delete, one or more nucleic acids at or near a desired nucleic acid sequence, e.g., desired sequence of an LSD1 gene.

[0466] Like a TALEN, a ZFN comprises a FokI nuclease domain (or derivative thereof) fused to a DNA-binding domain. In the case of a ZFN, the DNA-binding domain comprises one or more zinc fingers. Carroll et al. (2011) Genetics Society of America 188: 773-782; and Kim et al. (1996) Proc. Natl. Acad. Sci. USA 93: 1156-1160.

[0467] A zinc finger is a small protein structural motif stabilized by one or more zinc ions. A zinc finger can comprise, for example, Cys2His2, and can recognize an approximately 3-bp sequence. Various zinc fingers of known specificity can be combined to produce multi-finger polypeptides which recognize about 6, 9, 12, 15 or 18-bp sequences. Various selection and modular assembly techniques are available to generate zinc fingers (and combinations thereof) recognizing specific sequences, including phage display, yeast one-hybrid systems, bacterial one-hybrid and two-hybrid systems, and mammalian cells.

[0468] Like a TALEN, a ZFN must dimerize to cleave DNA. Thus, a pair of ZFNs are required to target non-palindromic DNA sites. The two individual ZFNs must bind opposite strands of the DNA with their nucleases properly spaced apart. Bitinaite et al. (1998) Proc. Natl. Acad. Sci. USA 95: 10570-5.

[0469] Also like a TALEN, a ZFN can create a double-stranded break in the DNA, which can create a frame-shift mutation if improperly repaired, leading to a decrease in the expression and amount of the target gene in a cell. ZFNs can also be used with homologous recombination to mutate the target gene or locus, or to introduce nucleic acid encoding a desired transgene at a site at or near the targeted sequence.

[0470] ZFNs specific to sequences in a target gene can be constructed using any method known in the art. See, e.g., Provasi (2011) Nature Med. 18: 807-815; Torikai (2013) Blood 122: 1341-1349; Cathomen et al. (2008) Mol. Ther. 16: 1200-7; and Guo et al. (2010) J Mol. Biol. 400: 96; U.S. Patent Publication 2011/0158957; and U.S. Patent Publication 2012/0060230, the contents of which are hereby incorporated by reference in their entirety. In embodiments, The ZFN gene editing system may also comprise nucleic acid encoding one or more components of the ZFN gene editing system.

[0471] Thus, in exemplary embodiments, the genome editing system LSD1 inhibitor is a zinc finger nuclease gene editing system specific for a LSD1 gene, e.g., KDM1A. Such systems are known generally in the art and zinc finger nuclease genome editing systems specific for LSD1 can be generated using known methods. See, e.g., Provasi (2011) Nature Med. 18: 807-815; Torikai (2013) Blood 122: 1341-1349; Cathomen et al. (2008) Mol. Ther. 16: 1200-7; Guo et al. (2010) J. Mol. Biol. 400: 96; U.S. Patent Publication 2011/0158957; and U.S. Patent Publication 2012/0060230.

[0472] In an exemplary embodiment, the genome editing system LSD1 inhibitor is a meganuclease system. Such systems are known generally in the art and meganuclease genome editing systems specific for LSD1 can be generated using known methods.

### Small Molecule LSD1 Inhibitors

[0473] In one aspect the LSD1 inhibitor is a small molecule. Exemplary small molecule LSD1 inhibitors are provided below, and additional candidate molecules may be identified by known assays, such as LSD1 binding assays and the assays described herein.

[0474] Useful lysine specific demethylase 1 (LSD1) inhibitors include both irreversible and reversible inhibitors. Reviews describing a variety of reversible and irreversible LSD1 inhibitors were published by Mould, Daniel P., et al., “Reversible Inhibitors of LSD1 as Therapeutic Agents in Acute Myeloid Leukemia: Clinical Significance and Progress to Date,” Med. Res. Rev., 35, No. 3, 586-618, (2015); and Xheng, Yi-Choa, et. al., “A Systematic Review of Histone Lysine-Specific Demethylase 1 and Its Inhibitors” Med. Res. Rev., 35, No. 5, 1032-1071, (2015), incorporated herein by reference. Suitable LSD1 inhibitors are also disclosed in PCT Patent Publication Nos. WO07/021839; WO2010/043721; WO2010/084160; WO2011/035941; WO2011/042217; WO2012/013727; WO2012/034116; WO2012/071469; WO2012/135113; WO2013/057320; WO2013/057322; WO2014/205213; WO2015/031564; WO2015/123408; WO2015/123437; WO2015/123465; and WO2015/156417. Representative examples of irreversible and reversible LSD1 inhibitors are described herein below.

[0475] Exemplary irreversible LSD1 inhibitors include: GSK-LSD1 (trans-racemic) dihydrochloride, rel-N-[(1R,2S)-2-Phenylcyclopropyl]-4-piperidinamine hydrochloride (1:2) (available from Sigma-Aldrich); Tranylcypromine; N-[(1S,2R)-2-phenylcyclopropyl]-4-piperidinemethanamine (GSK2699537, described in PCT publication Nos. WO 2013057320 and WO 2012135113); 4-[[4-[[[(1R,2S)-2-phenylcyclopropyl]amino]methyl]-1-piperidinyl]methyl]-benzoic acid or a pharmaceutically acceptable salt thereof (GSK2879552, described in PCT publication No. WO 2012135113); trans-N1-[(1R,2S)-2-phenylcyclopropyl]-1,4-cyclohexanediamine or a pharmaceutically acceptable salt thereof (ORY-1001, described in PCT publication No. WO 2013057322); rel-1-(4-methyl-1-piperazinyl)-2-[[(1R*,2S*)-2-[4-phenylmethoxy)phenyl]cyclopropyl]amino]ethanone or a pharmaceutically acceptable salt thereof (RN-1, described in PCT Publication No. WO 2010043721); rel-2-[[(1R,2S)-2-[4-[(4-chlorophenyl)methoxy]phenyl]cyclopropyl]amino]-1-(4-methyl-1-piperazinyl)-ethanone or a pharmaceutically acceptable salt thereof (described in PCT Publication No. WO 2010043721); 4′-((1R,2S)-2-Aminocyclopropyl)biphenyl-3-ol or a pharmaceutically acceptable salt thereof (OG-L002, described in PCT Publication No. WO 2012013727); (1S,2R)-N-((2-methoxypyridin-3-yl)methyl)-2-phenylcyclopropan-1-amine (described in PCT Publication No. WO2010/084160) or a pharmaceutically acceptable salt thereof.

[0476] Examplary reversible LSD1 inhibitors include: Namoline (available from ChemBridge, San Diego, CA); 3-(4-morpholinylsulfonyl)-benzoic acid, (2E)-2-[1-(5-chloro-2-hydroxyphenyl)ethylidene]hydrazide (SP-2509, described in PCT Publication No. WO 2014205213); 3-[[4-[4-(Aminoiminomethyl)benzoyl]-1-piperazinyl]carbonyl]-5-[[4-(aminoiminomethyl)-1-piperazinyl]methyl]-benzoic acid, methyl ester (CBB-1007, available from DSK Biopharma, Inc., and described in PCT Publication No. WO2012/071469); (R)-4-(5-(pyrrolidin-3-ylmethoxy)-2-(p-tolyl)pyridin-3-yl)benzonitrile (GSK354); N,N-dimethyl-1-((4-(4-(4-(piperidin-4-yl)phenyl)-1H-indazol-1-yl)phenyl)sulfonyl)piperidin-4-amine; 5-(6-chloro-4′-(methylsulfonyl)-[1,1′-biphenyl]-3-yl)-2-(piperazin-1-yl)-1H-pyrrole-3-carbonitrile; and trans-3-(3-amino-2-methylphenyl)-1-(4-hydroxycyclohexyl)-6-methyl-1H-indole-5-carbonitrile; or a pharmaceutically acceptable salt of any of the foregoing.

[0477] Additional exemplary LSD1 inhibitors are provided in Table 3, below.

TABLE 3

| | | LCMS | Also Referred |
|---|---|---|---|
| | | IC50 | to in this |
| Chemical Name | Structure | (uM)* | Application As |
| rel-2-[[(1R,2S)-2-[4-[(4- chlorophenyl)methoxy] phenyl]cyclopropyl] amino]-1-(4-methyl-1- piperazinyl)-ethanone | [chemical structure] | 0.01 | |
| (1S,2R)-N-((2- methoxypyridin-3- yl)methyl)-2- phenylcyclopropan- 1-amine | [chemical structure] | 0.02 | Compound A |
| rel-N-[(1R,2S)-2- Phenylcyclopropyl]-4- Piperidinamine hydrochloride (1:2) | [chemical structure] | — | GSK-LSD1; LSD1i-GSK |
| 2-(1R,2S)-2-(4- (Benzyloxy)phenyl) cyclopropylamino)-1- (4-methylpiperazin- 1-yl)ethanone, HCl | [chemical structure] | — | LSD1i-IV; LSD1i-EMD |
| GSK2699537 | [chemical structure] | 0.0007 | Compound B |
| GSK2879552 | [chemical structure] | — | |
| (R)-4-(5-(pyrrolidin- 3-ylmethoxy)-2-(p- tolyl)pyridin-3- yl)benzonitrile | [chemical structure] | 0.03 | GSK354; Compound C |
| N,N-dimethyl-1-((4-(4- (4-(piperidin-4-yl) phenyl)-1H-indazol-1- yl)phenyl)sulfonyl) piperidin-4-amine | [chemical structure] | 0.009 | described in Example 3 |
| 5-(6-chloro-4′- (methylsulfonyl)- [1,1′-biphenyl]-3-yl)- 2-(piperazin-1-yl)-1H- pyrrole-3-carbonitrile | [chemical structure] | 0.012 | described in Example 2 |
| Trans-3-(3-amino-2- methylphenyl)-1-(4- hydroxycyclohexyl)- 6-methyl-1H- indole-5-carbonitrile (Described in Example 6) | [chemical structure] | 0.003 | NVS Compound 1; Compound 93 |

*LSD1 IC50 as measured by LCMS.

[0478] Small molecule LSD1 inhibitors useful according to the present invention also include prodrugs, derivatives, pharmaceutically acceptable salts, or analogs thereof of any of the foregoing. Small molecule LSD1 inhibitors may be formulated for delivery based on well-established methods in the art based on the particular dosages described herein.

[0479] In embodiments, the LSD1 small molecule inhibitor may be conjugated to an antibody or antigen binding fragment thereof. In an embodiment, the antibody or antigen-binding fragment thereof has specificity for an antigen expressed on the surface of a T cell.

### Protein LSD1 Inhibitors

[0480] In embodiments, the LSD1 inhibitor may be a protein LSD1 inhibitor. In embodiments, the protein LSD1 inhibitor is a dominant negative binding partner of LSD1 (e.g., a histone deacetylase (HDAC) that interacts with LSD1 or other member of the Co-REST or AR co-activator complex), or nucleic acid encoding said dominant negative binding partner of LSD1. In embodiments, the protein LSD1 inhibitor is a dominant negative (e.g., catalytically inactive) LSD1, or nucleic acid encoding said molecule.

Methods of Preparing Populations of Immune Effector Cells Using LSD1 inhibitors

[0481] The invention features the use of LSD1 inhibitors in the manufacture of a population of immune effector cells, e.g., engineered to express a CAR molecule, e.g., as described herein. Without being bound by theory, the invention in part rests upon the surprising and unexpected discovery that inhibition of LSD1 in immune effector cells, e.g., T cells, results in a population of immune effector cells, e.g., T cells, with a higher number and/or higher proportion of naive immune effector cells, e.g., T cells, and with improved therapeutic properties. The inhibition of LSD1 in said immune effector cells may occur before and/or concurrently with therapy that includes said cells. Thus, one aspect of the invention relates to compositions for and use of LSD1 inhibitors in the manufacture of immune effector cells, e.g., T cells.

[0482] In one aspect, the invention provides a method of making a population of immune effector cells, which is optionally a population of T cells, including the steps of
[0483] a) contacting a population of immune effector cells with an LSD1 inhibitor; thereby making a population of immune effector cells, which is optionally a population of T cells, wherein the contacting with the LSD1 inhibitor causes one or more of the following to occur:
[0484] 1) an increase in the proportion of naive T cells, e.g., T_{SCM} cells;
[0485] 2) an increase in the number of naive T cells, e.g., T_{SCM} cells;
[0486] 3) a decrease in the number of T_{EM} cells;
[0487] 4) a decrease in the proportion of T_{EM} cells;
[0488] 5) an increase in the proportion of CD45RA+CD62L+ T cells;
[0489] 6) an increase in the number of CD45RA+CD62L+ T cells;
[0490] 7) an increase in the proportion of CD45RA+CCR7+ T cells;
[0491] 8) an increase in the number of CD45RA+CCR7+ T cells;
[0492] 9) a decrease in the proportion of PD-1 positive immune effector cells;
[0493] 10) an increase in the ratio of PD-1 negative immune effector cells/PD-1 positive immune effector cells;
[0494] 11) a decrease in the proportion of PD-1+/Lag3+/Tim3+ immune effector cells;
[0495] 12) an increase in the ratio of PD-1−/Lag3−/Tim3− immune effector cells to PD-1+/Lag3+/Tim3+ immune effector cells;
[0496] 13) an increase in the proliferation of the immune effector cells;
[0497] 14) an increase in the production of cytokines (e.g., IFNg and/or IL-2) from said population of immune effector cells; or
[0498] 15) a combination of two, three, four, five, six, seven, eight, nine, ten, eleven, twelve, thirteen or more (e.g., all) of the above;
[0499] optionally, as compared to a non-contacted population of immune effector cells.

[0500] In embodiments, the method further includes the step of b) inserting nucleic acid that encodes the CAR into cells of the population of immune effector cells. In embodiments, the contacting of step a) occurs 1) prior to; 2) concurrently with; 3) after; or 4) both before and after; said inserting of step b). In embodiments, the contacting of step a), and optionally the inserting of step b), is ex vivo.

[0501] In another aspect, the invention provides a method of making a population of immune effector cells, which is optionally a population of T cells, including the steps, optionally in the order listed, of:
[0502] a) providing a population of immune effector cells ex vivo;
[0503] b) contacting a population of immune effector cells ex vivo with an LSD1 inhibitor; thereby making a population of immune effector cells, which is optionally a population of T cells, wherein the contacting with the LSD1 inhibitor causes one or more of the following to occur:
[0504] 1) an increase in the proportion of naive T cells, e.g., T_{SCM} cells;
[0505] 2) an increase in the number of naive T cells, e.g., T_{SCM} cells;
[0506] 3) a decrease in the number of T_{EM} cells;
[0507] 4) a decrease in the proportion of T_{EM} cells;
[0508] 5) an increase in the proportion of CD45RA+CD62L+ T cells;
[0509] 6) an increase in the number of CD45RA+CD62L+ T cells;
[0510] 7) an increase in the proportion of CD45RA+CCR7+ T cells;
[0511] 8) an increase in the number of CD45RA+CCR7+ T cells;
[0512] 9) a decrease in the proportion of PD-1 positive immune effector cells;
[0513] 10) an increase in the ratio of PD-1 negative immune effector cells/PD-1 positive immune effector cells;
[0514] 11) a decrease in the proportion of PD-1+/Lag3+/Tim3+ immune effector cells;
[0515] 12) an increase in the ratio of PD-1−/Lag3−/Tim3− immune effector cells to PD-1+/Lag3+/Tim3+ immune effector cells;
[0516] 13) an increase in the proliferation of the immune effector cells;
[0517] 14 an increase in the production of cytokines (e.g., IFNg and/or IL-2) from said population of immune effector cells; or
[0518] 15) a combination of two, three, four, five, six, seven, eight, nine, ten, eleven, twelve, thirteen or more (e.g., all) of the above;
[0519] optionally, as compared to a non-contacted population of immune effector cells.

[0520] In embodiments, the method further includes the step of c) inserting nucleic acid that encodes the CAR into cells of the population of immune effector cells. In embodiments, the contacting of step b) occurs 1) prior to; 2) concurrently with; 3) after; or 4) both before and after; said inserting of step c). In embodiments, the contacting of step b), and optionally the inserting of step c), is ex vivo.

[0521] In another aspect, the invention provides a method of making a population of immune effector cells, which is optionally a population of T cells, including the steps, optionally in the order listed, of:
[0522] a) administering to a subject an LSD1 inhibitor;
[0523] wherein the administering the LSD1 inhibitor causes one or more of the following to occur in said subject:
[0524] 1) an increase in the proportion of naive T cells, e.g., T_{SCM} cells;
[0525] 2) an increase in the number of naive T cells, e.g., T_{SCM} cells;
[0526] 3) a decrease in the number of T_{EM} cells;
[0527] 4) a decrease in the proportion of T_{EM} cells;
[0528] 5) an increase in the proportion of CD45RA+CD62L+ T cells;
[0529] 6) an increase in the number of CD45RA+CD62L+ T cells;
[0530] 7) an increase in the proportion of CD45RA+CCR7+ T cells;
[0531] 8) an increase in the number of CD45RA+CCR7+ T cells;
[0532] 9) a decrease in the proportion of PD-1 positive immune effector cells;
[0533] 10) an increase in the ratio of PD-1 negative immune effector cells/PD-1 positive immune effector cells;
[0534] 11) a decrease in the proportion of PD-1+/Lag3+/Tim3+ immune effector cells;
[0535] 12) an increase in the ratio of PD-1−/Lag3−/Tim3− immune effector cells to PD-1+/Lag3+/Tim3+ immune effector cells;
[0536] 13) an increase in the proliferation of the immune effector cells;
[0537] 14) an increase in the production of cytokines (e.g., IFNg and/or IL-2) from said population of immune effector cells; or
[0538] 15) a combination of two, three, four, five, six, seven, eight, nine, ten, eleven, twelve, thirteen or more (e.g., all) of the above;
[0539] optionally, as compared to a population of immune effector cells from a non-administered subject;
[0540] b) providing a population of immune effector cells from said subject ex vivo; thereby making a population of immune effector cells, which is optionally a population of T cells. In embodiments, the method further includes the step of c) inserting nucleic acid that encodes the CAR into cells of the population of immune effector cells.

[0541] In another aspect, the invention provides a method of making a population of immune effector cells, which is optionally a population of T cells, including the steps, optionally in the order listed, of:
[0542] a) administering to a subject an LSD1 inhibitor;
[0543] b) providing a population of immune effector cells from said subject ex vivo; c) contacting a population of immune effector cells ex vivo with an LSD1 inhibitor; thereby making a population of immune effector cells, which is optionally a population of T cells, wherein one or more of the following occurs:
[0544] 1) an increase in the proportion of naive T cells, e.g., T_{SCM} cells;
[0545] 2) an increase in the number of naive T cells, e.g., T_{SCM} cells;
[0546] 3) a decrease in the number of T_{EM} cells;
[0547] 4) a decrease in the proportion of T_{EM} cells;
[0548] 5) an increase in the proportion of CD45RA+CD62L+ T cells;
[0549] 6) an increase in the number of CD45RA+CD62L+ T cells;
[0550] 7) an increase in the proportion of CD45RA+CCR7+ T cells;
[0551] 8) an increase in the number of CD45RA+CCR7+ T cells;
[0552] 9) a decrease in the proportion of PD-1 positive immune effector cells;
[0553] 10) an increase in the ratio of PD-1 negative immune effector cells/PD-1 positive immune effector cells;
[0554] 11) a decrease in the proportion of PD-1+/Lag3+/Tim3+ immune effector cells;
[0555] 12) an increase in the ratio of PD-1−/Lag3−/Tim3− immune effector cells to PD-1+/Lag3+/Tim3+ immune effector cells;
[0556] 13) an increase in the proliferation of the immune effector cells;
[0557] 14 an increase in the production of cytokines (e.g., IFNg and/or IL-2) from said population of immune effector cells; or
[0558] 15) a combination of two, three, four, five, six, seven, eight, nine, ten, eleven, twelve, thirteen or more (e.g., all) of the above;
[0559] optionally, as compared to a non-contacted and non-administered population of immune effector cells.

[0560] In embodiments, the method further includes the step of d) inserting nucleic acid that encodes the CAR into cells of the population of immune effector cells. In embodiments, the contacting of step c) occurs 1) prior to; 2) concurrently with; 3) after; or 4) both before and after; said inserting of step d).

[0561] In aspects the administration of the LSD1 inhibitor to the subject prior to collection of the population of immune effector cells from said subject may be of sufficient time and/or at a sufficient dose so that one or more of the following occurs:
[0562] 1) an increase in the proportion of naive T cells, e.g., T_{SCM} cells;
[0563] 2) an increase in the number of naive T cells, e.g., T_{SCM} cells;
[0564] 3) a decrease in the number of T_{EM} cells;
[0565] 4) a decrease in the proportion of T_{EM} cells;
[0566] 5) an increase in the proportion of CD45RA+CD62L+ T cells;
[0567] 6) an increase in the number of CD45RA+CD62L+ T cells;
[0568] 7) an increase in the proportion of CD45RA+CCR7+ T cells;
[0569] 8) an increase in the number of CD45RA+CCR7+ T cells;
[0570] 9) a decrease in the proportion of PD-1 positive immune effector cells;
[0571] 10) an increase in the ratio of PD-1 negative immune effector cells/PD-1 positive immune effector cells;
[0572] 11) a decrease in the proportion of PD-1+/Lag3+/Tim3+ immune effector cells;
[0573] 12) an increase in the ratio of PD-1−/Lag3−/Tim3− immune effector cells to PD-1+/Lag3+/Tim3+ immune effector cells;
[0574] 13) an increase in the proliferation of the immune effector cells;
[0575] 14) an increase in the production of cytokines (e.g., IFNg and/or IL-2) from said population of immune effector cells; or
[0576] 15) a combination of two, three, four, five, six, seven, eight, nine, ten, eleven, twelve, thirteen or more (e.g., all) of the above;
[0577] optionally, as compared to non-administered population of immune effector cells. The assays described herein may be utilized in order to determine the proper dose and or time of administration. In embodiments, the LSD1 inhibitor is administered for a period of at least 1 day prior to collection of the population of immune effector cells from said subject. In embodiments, the LSD1 inhibitor is administered for a period of at least 2 days prior to collection of the population of immune effector cells from said subject. In embodiments, the LSD1 inhibitor is administered for a period of at least 3 days prior to collection of the population of immune effector cells from said subject. In embodiments, the LSD1 inhibitor is administered for a period of at least 4 days prior to collection of the population of immune effector cells from said subject. In embodiments, the LSD1 inhibitor is administered for a period of at least 5 days prior to collection of the population of immune effector cells from said subject. In embodiments, the LSD1 inhibitor is administered for a period of at least 6 days prior to collection of the population of immune effector cells from said subject. In embodiments, the LSD1 inhibitor is administered for a period of at least 7 days prior to collection of the population of immune effector cells from said subject. In embodiments, the LSD1 inhibitor is administered for a period of at least a week or weeks prior to collection of the population of immune effector cells from said subject.

[0578] In embodiments, the administration of the LSD1 inhibitor to the subject continues after collection of the immune effector cells from said subject, e.g., continues for a period of 1, 2, 3, 4, 5, 6, 7, 8, 9, 10, 11, 12, 13, 14, 15, 16, 17, 18, 19, 20 or more days after collection of the immune effector cells, e.g., continues at least until the immune effector cells (modified ex vivo) are administered back to the subject, e.g., continues past the time when the immune effector cells (modified ex vivo) are administered back to the subject.

[0579] In aspects the contacting (e.g., ex vivo) of the LSD1 inhibitor to the population of immune effector cells may be of sufficient time and/or at a sufficient dose so that one or more of the following occurs:
[0580] 1) an increase in the proportion of naive T cells, e.g., T_{SCM} cells;
[0581] 2) an increase in the number of naive T cells, e.g., T_{SCM} cells;
[0582] 3) a decrease in the number of T_{EM} cells;
[0583] 4) a decrease in the proportion of T_{EM} cells;
[0584] 5) an increase in the proportion of CD45RA+CD62L+ T cells;
[0585] 6) an increase in the number of CD45RA+CD62L+ T cells;
[0586] 7) an increase in the proportion of CD45RA+CCR7+ T cells;
[0587] 8) an increase in the number of CD45RA+CCR7+ T cells;
[0588] 9) a decrease in the proportion of PD-1 positive immune effector cells;
[0589] 10) an increase in the ratio of PD-1 negative immune effector cells/PD-1 positive immune effector cells;
[0590] 11) a decrease in the proportion of PD-1+/Lag3+/Tim3+ immune effector cells;
[0591] 12) an increase in the ratio of PD-1−/Lag3−/Tim3− immune effector cells to PD-1+/Lag3+/Tim3+ immune effector cells;
[0592] 13) an increase in the proliferation of the immune effector cells;
[0593] 14 an increase in the production of cytokines (e.g., IFNg and/or IL-2) from said population of immune effector cells; or
[0594] 15) a combination of two, three, four, five, six, seven, eight, nine, ten, eleven, twelve, thirteen or more (e.g., all) of the above;
[0595] optionally, as compared to non-contacted population of immune effector cells. The assays described herein may be utilized in order to determine the proper dose and or time of administration. In embodiments, the population of immune effector cells is contacted with an LSD1 inhibitor for a period of at least 1 day. In embodiments, the population of immune effector cells is contacted with an LSD1 inhibitor for a period of at least 2 days. In embodiments, the population of immune effector cells is contacted with an LSD1 inhibitor for a period of at least 3 days. In embodiments, the population of immune effector cells is contacted with an LSD1 inhibitor for a period of at least 4 days. In embodiments, the population of immune effector cells is contacted with an LSD1 inhibitor for a period of at least 5 days. In embodiments, the population of immune effector cells is contacted with an LSD1 inhibitor for a period of at least 6 days. In embodiments, the population of immune effector cells is contacted with an LSD1 inhibitor for a period of at least 7 days. In embodiments, the population of immune effector cells is contacted with an LSD1 inhibitor for a period of at least a week or weeks. In embodiments, media containing the LSD1 inhibitor is replaced with fresh media containing the LSD1 inhibitor, e.g., once, twice, three times, 4 times, 5 times, 6 times, 7 times, or more than 7 times (e.g., every day or every other day) during the time the immune effector cells are ex vivo. The concentration of LSD1 inhibitor can be adjusted in order that the desired effect occurs, and may be, for example, about 0.001 nM to about 10 mM, e.g., about 0.01 nM to about 1 mM, e.g., about 0.1 nM to about 100 uM, e.g., from about 1 nM to about 100 uM, e.g., from about 10 nM to about 100 uM, e.g., from about 100 nM to about 10 uM, e.g., from about 0.001 nM to about 100 nM, or e.g., from about 0.1 uM to about 10 uM. In embodiments, the concentration of LSD1 inhibitor is 100 nM. In embodiments, the concentration of LSD1 inhibitor is about 100 uM. In embodiments, the concentration of LSD1 inhibitor is 200 nM. In embodiments, the concentration of LSD1 inhibitor is about 200 uM.

[0596] In another aspect the invention provides a composition for use in ex vivo manufacturing a population of immune effector cells, that includes an LSD1 inhibitor, e.g., a small molecule LSD1 inhibitor. In embodiments, the composition includes the small molecule LSD1 inhibitor at a concentration of from about 0.001 nM to about 10 mM, e.g., from about 0.001 nM to about 100 nM, or, e.g., from about 0.1 uM to about 10 uM.

[0597] In embodiments involving immune effector cells engineered to express a CAR molecule, e.g., as described herein, it is understood that the method may further include any of the aspects, steps or features described below in the section relating to Chimeric Antigen Receptors.

Methods of Treatment with Immune Effector Cells and LSD1 Inhibitors

[0598] The invention features the use of LSD1 inhibitors in the treatment of a disease, e.g., cancer, in a patient wherein such treatment is in combination with administration of a population of immune effector cells, e.g., immune effector cells engineered to express a CAR molecule, e.g., as described herein. Without being bound by theory, the invention in part rests upon the surprising and unexpected discovery that inhibition of LSD1 in immune effector cells, e.g., T cells, results in a population of immune effector cells, e.g., T cells, with a higher number and/or higher proportion of naive immune effector cells, e.g., T cells, and with improved therapeutic properties. Thus, one aspect of the invention provides treatment of a disease, e.g., a cancer, with a combination of a population of immune effector cells, e.g., engineered to express a CAR molecule, e.g., as described herein, and an LSD1 inhibitor.

[0599] In one aspect, the invention features a method of treating a subject that includes administering an LSD1 inhibitor to the subject, wherein said subject has received, is receiving or is about to receive a population of immune effector cells engineered to express a chimeric antigen receptor (CAR). In embodiments, the method includes administering to said subject an LSD1 inhibitor and a population of immune effector cells engineered to express a CAR molecule, e.g., as described herein. In embodiments, the LSD1 inhibitor is administered before the population of immune effector cells engineered to express a CAR molecule, e.g., as described herein, and wherein said administration of the LSD1 inhibitor is continued for a period of time after the administration of the population of immune effector cells engineered to express a CAR molecule, e.g., as described herein. In other embodiments, the administration of the LSD1 inhibitor after the administration of the population of immune effector cells engineered to express a CAR molecule, e.g., as described herein is in an amount sufficient to increase an anti-tumor effect of the population of immune effector cells engineered to express a CAR molecule, e.g., as described herein relative to an equivalent population of immune effector cells engineered to express a CAR molecule, e.g., as described herein administered in the absence of said LSD1 inhibitor.

[0600] In another aspect, the invention features a method of increasing the therapeutic efficacy in a subject of a population of immune effector cells engineered to express a CAR molecule, e.g., as described herein, e.g., a CAR19 (e.g., CTL019), including a step of decreasing the activity or expression of LSD1 in said cell, at least transiently. In embodiments, the step of decreasing the activity or expression of LSD1 in said cell includes contacting the cell with an LSD1 inhibitor. In embodiments, the contacting is done ex vivo. In embodiments, the contacting is done in vivo (e.g., the population of immune effector cells and the LSD1 inhibitor are coadministered to the subject).

[0601] In embodiments of any of the forgoing aspect, the administration or the contacting of the LSD1 inhibitor results in:
[0602] 1) an increase in the proportion of naive T cells, e.g., T_{SCM} cells;
[0603] 2) an increase in the number of naive T cells, e.g., T_{SCM} cells;
[0604] 3) a decrease in the number of T_{EM} cells;
[0605] 4) a decrease in the proportion of T_{EM} cells;
[0606] 5) an increase in the proportion of CD45RA+CD62L+ T cells;
[0607] 6) an increase in the number of CD45RA+CD62L+ T cells;
[0608] 7) an increase in the proportion of CD45RA+CCR7+ T cells;
[0609] 8) an increase in the number of CD45RA+CCR7+ T cells;
[0610] 9) a decrease in the proportion of PD-1 positive immune effector cells;
[0611] 10) an increase in the ratio of PD-1 negative immune effector cells/PD-1 positive immune effector cells;
[0612] 11) a decrease in the proportion of PD-1+/Lag3+/Tim3+ immune effector cells;
[0613] 12) an increase in the ratio of PD-1−/Lag3−/Tim3− immune effector cells to PD-1+/Lag3+/Tim3+ immune effector cells;
[0614] 13) an increase in the proliferation of the immune effector cells;
[0615] 14) an increase in the production of cytokines (e.g., IFNg and/or IL-2) from said population of immune effector cells; or
[0616] 15) a combination of two, three, four, five, six, seven, eight, nine, ten, eleven, twelve, thirteen or more (e.g., all) of the above.

[0617] In embodiments, the effect is as compared to cells not contacted with the LSD1 inhibitor. In embodiments, the effect is as compared to cells of the same subject not contacted with the LSD1 inhibitor.

[0618] In another aspect, the invention provides a method of treating a subject, that includes:
[0619] a) administering an LSD1 inhibitor to said subject;
[0620] b) collecting a population of immune effector cells from said subject after said administration of the LSD1 inhibitor;
[0621] c) providing said population of immune effector cells ex vivo;
[0622] d) contacting said ex vivo population of immune effector cells with the LSD1 inhibitor, wherein the contacting with the LSD1 inhibitor causes one or more of the following to occur:
   [0623] 1) an increase in the proportion of naive T cells, e.g., T_{SCM} cells;
   [0624] 2) an increase in the number of naive T cells, e.g., T_{SCM} cells;
   [0625] 3) a decrease in the number of T_{EM} cells;
   [0626] 4) a decrease in the proportion of T_{EM} cells;
   [0627] 5) an increase in the proportion of CD45RA+CD62L+ T cells;
   [0628] 6) an increase in the number of CD45RA+CD62L+ T cells;
   [0629] 7) an increase in the proportion of CD45RA+CCR7+ T cells;
   [0630] 8) an increase in the number of CD45RA+CCR7+ T cells;
   [0631] 9) a decrease in the proportion of PD-1 positive immune effector cells;
   [0632] 10) an increase in the ratio of PD-1 negative immune effector cells/PD-1 positive immune effector cells;
   [0633] 11) a decrease in the proportion of PD-1+/Lag3+/Tim3+ immune effector cells;
   [0634] 12) an increase in the ratio of PD-1−/Lag3−/Tim3− immune effector cells to PD-1+/Lag3+/Tim3+ immune effector cells;
   [0635] 13) an increase in the proliferation of the immune effector cells;
   [0636] 14) an increase in the production of cytokines (e.g., IFNg and/or IL-2) from said population of immune effector cells; or
   [0637] 15) a combination of two, three, four, five, six, seven, eight, nine, ten, eleven, twelve, thirteen or more (e.g., all) of the above;
[0638] optionally, as compared to a non-contacted ex vivo population of immune effector cells; and
[0639] e) administering the population of immune effector cells to the subject.

[0640] In embodiments, step of e) further includes administering the LSD1 inhibitor to the subject. In embodiments, the method further includes the step of inserting nucleic acid that encodes a CAR into cells of the ex vivo population of immune effector cells.

[0641] In another aspect the invention provides a method of treating a subject in need thereof, including administering to said subject an effective amount of the population of immune effector cells of any of the previous aspects and embodiments. In embodiments, the method further includes administering to said subject an LSD1 inhibitor. In embodiments, the subject receives a pre-treatment of the LSD1 inhibitor, prior to the administration of the population of immune effector cells. In embodiments, the subject receives concurrent treatment with an LSD1 inhibitor and the population of immune effector cells. In embodiments, the subject receives treatment with an LSD1 inhibitor after administration of the population of immune effector cells; In embodiments, the subject receives a combination of any of the foregoing.

[0642] In an aspect, including in the previous aspects relating to methods of treatment, the invention relates to methods of treating a subject, wherein the subject has a disease associated with expression of a tumor antigen, e.g., a proliferative disease, a precancerous condition, a cancer, and a non-cancer related indication associated with expression of the tumor antigen. In embodiments, the cancer is a hematologic cancer chosen from one or more of chronic lymphocytic leukemia (CLL), acute leukemias, acute lymphoid leukemia (ALL), acute myeloid leukemia (AML), B-cell acute lymphoid leukemia (B-ALL), T-cell acute lymphoid leukemia (T-ALL), chronic myelogenous leukemia (CML), B cell prolymphocytic leukemia, blastic plasmacytoid dendritic cell neoplasm, Burkitt's lymphoma, diffuse large B cell lymphoma, follicular lymphoma, hairy cell leukemia, small cell- or a large cell-follicular lymphoma, malignant lymphoproliferative conditions, MALT lymphoma, mantle cell lymphoma, marginal zone lymphoma, multiple myeloma, myelodysplasia and myelodysplastic syndrome, non-Hodgkin's lymphoma, Hodgkin's lymphoma, plasmablastic lymphoma, plasmacytoid dendritic cell neoplasm, Waldenstrom macroglobulinemia, or pre-leukemia. In embodiments, the cancer is selected from the group consisting of colon cancer, rectal cancer, renal-cell carcinoma, liver cancer, non-small cell carcinoma of the lung, cancer of the small intestine, cancer of the esophagus, melanoma, bone cancer, pancreatic cancer, skin cancer, cancer of the head or neck, cutaneous or intraocular malignant melanoma, uterine cancer, ovarian cancer, rectal cancer, cancer of the anal region, stomach cancer, testicular cancer, uterine cancer, carcinoma of the fallopian tubes, carcinoma of the endometrium, carcinoma of the cervix, carcinoma of the vagina, carcinoma of the vulva, Hodgkin's Disease, non-Hodgkin's lymphoma, cancer of the endocrine system, cancer of the thyroid gland, cancer of the parathyroid gland, cancer of the adrenal gland, sarcoma of soft tissue, cancer of the urethra, cancer of the penis, solid tumors of childhood, cancer of the bladder, cancer of the kidney or ureter, carcinoma of the renal pelvis, neoplasm of the central nervous system (CNS), primary CNS lymphoma, tumor angiogenesis, spinal axis tumor, brain stem glioma, pituitary adenoma, Kaposi's sarcoma, epidermoid cancer, squamous cell cancer, T-cell lymphoma, environmentally induced cancers, combinations of said cancers, and metastatic lesions of said cancers.

[0643] In embodiments involving immune effector cells engineered to express a CAR molecule, e.g., as described herein, it is understood that the treatment method may further include any of the steps, aspects or features described below in the section relating to Chimeric Antigen Receptors.

### Cells

[0644] As will be readily apparent to the skilled artisan from this disclosure, the invention relates to cells comprising LSD1 inhibitors. The invention further includes cells that have been contacted with an LSD1 inhibitor, e.g., for a period of time and/or at a dose sufficient for one or more of the following to occur:
[0645] 1) an increase in the proportion of naive T cells, e.g., T_{SCM} cells;
[0646] 2) an increase in the number of naive T cells, e.g., T_{SCM} cells;
[0647] 3) a decrease in the number of T_{EM} cells;
[0648] 4) a decrease in the proportion of T_{EM} cells;
[0649] 5) an increase in the proportion of CD45RA+CD62L+ T cells;
[0650] 6) an increase in the number of CD45RA+CD62L+ T cells;
[0651] 7) an increase in the proportion of CD45RA+CCR7+ T cells;
[0652] 8) an increase in the number of CD45RA+CCR7+ T cells;
[0653] 9) a decrease in the proportion of PD-1 positive immune effector cells;
[0654] 10) an increase in the ratio of PD-1 negative immune effector cells/PD-1 positive immune effector cells;
[0655] 11) a decrease in the proportion of PD-1+/Lag3+/Tim3+ immune effector cells;
[0656] 12) an increase in the ratio of PD-1−/Lag3−/Tim3− immune effector cells to PD-1+/Lag3+/Tim3+ immune effector cells;
[0657] 13) an increase in the proliferation of the immune effector cells;
[0658] 14 an increase in the production of cytokines (e.g., IFNg and/or IL-2) from said population of immune effector cells; or
[0659] 15) a combination of two, three, four, five, six, seven, eight, nine, ten, eleven, twelve, thirteen or more (e.g., all) of the above;
[0660] optionally, relative to un-contacted cells.

[0661] The invention further relates to cells made by any of the methods described herein.

[0662] The cells are preferably immune effector cells. In an embodiment, the cells are T cells. In an embodiment, the cells are NK cells. In embodiments, the invention relates to a population of cells of the invention, e.g., a population of immune effector cells of the invention. In embodiments, the population of cells of the invention comprises cells of the type indicated, and may comprise other types (e.g., a population of immune effector cells, e.g., T cells, engineered to express a CAR molecule, e.g., as described herein, may include T cells engineered to express a CAR molecule as well as T cells (or other cell types) that have not been engineered to express a CAR molecule). In embodiments, the population of cells of the invention consists essentially of cells of the type indicated. In embodiments, the population of cells of the invention is substantially free of other cell types. In embodiments, the population of cells of the invention consists of the indicated cell type.

[0663] In any of the foregoing aspects and embodiments, the cells and/or population of cells are or include immune effector cells, e.g., the population of immune effector cells includes, e.g., consists of, T cells or NK cells. In embodiments the cells are T cells, e.g., CD8+ T cells, CD4+ T cells, or a combination thereof. In embodiments the cells are NK cells.

[0664] In embodiments the cells are human cells. In embodiments, the cells are autologous, e.g., to the subject to be administered the cells. In embodiments, the cells are allogeneic, e.g., to the subject to be administered the cells.

[0665] In embodiments, the cells are, or include, cells engineered to express a CAR molecule, e.g., as described herein. Additional features and/or aspects of the cells useful in the invention are described below in the section entitled Chimeric Antigen Receptors.

[0666] In one embodiment, the immune effector cells expressing a CAR molecule, e.g., a CAR molecule described herein, are obtained from a subject that has received an LSD1 inhibitor. In an embodiment, the population of immune effector cells, e.g., T cells, to be engineered to express a CAR molecule, are harvested after a sufficient time, or after sufficient dosing of the LSD1 inhibitor, such that the level of PD1 negative immune effector cells, e.g., T cells, or the ratio of PD1 negative immune effector cells, e.g., T cells/PD1 positive immune effector cells, e.g., T cells, in the subject or harvested from the subject has been, at least transiently, increased.

[0667] In other embodiments, a population of immune effector cells, e.g., T cells, which have, or will be engineered to express a CAR molecule, e.g., as described herein, can be treated ex vivo by contact with an amount of an LSD1 inhibitor that increases the number of PD1 negative immune effector cells, e.g., T cells or increases the ratio of PD1 negative immune effector cells, e.g., T cells/PD1 positive immune effector cells, e.g., T cells.

[0668] In an embodiment, the NK cells are obtained from the subject. In another embodiment, the NK cells are an NK cell line, e.g., NK-92 cell line (Conkwest).

[0669] In an embodiment, immune effector cells, e.g., T cells, are obtained or harvested from a subject after administration to the subject of an LSD1 inhibitor.

[0670] In an embodiment, the immune effector cells, e.g., T cells, are collected after an increase in the number of PD1 negative immune effector, e.g., T cells, or after an increase in the ratio of PD1 negative immune effector, e.g., T cells/PD1 positive immune effector, e.g., T cells, has occurred.

[0671] In an embodiment, the immune effector cells, e.g., T cells, are collected after an increase in the number of naive T cells has occurred.

[0672] In an embodiment, the immune effector cells, e.g., T cells, are collected after one or more of the following:
[0673] 1) an increase in the proportion of naive T cells, e.g., T_{SCM} cells;
[0674] 2) an increase in the number of naive T cells, e.g., T_{SCM} cells;
[0675] 3) a decrease in the number of T_{EM} cells;
[0676] 4) a decrease in the proportion of T_{EM} cells;
[0677] 5) an increase in the proportion of CD45RA+CD62L+ T cells;
[0678] 6) an increase in the number of CD45RA+CD62L+ T cells;
[0679] 7) an increase in the proportion of CD45RA+CCR7+ T cells;
[0680] 8) an increase in the number of CD45RA+CCR7+ T cells;
[0681] 9) a decrease in the proportion of PD-1 positive immune effector cells;
[0682] 10) an increase in the ratio of PD-1 negative immune effector cells/PD-1 positive immune effector cells;
[0683] 11) a decrease in the proportion of PD-1+/Lag3+/Tim3+ immune effector cells;
[0684] 12) an increase in the ratio of PD-1−/Lag3−/Tim3− immune effector cells to PD-1+/Lag3+/Tim3+ immune effector cells;
[0685] 13) an increase in the proliferation of the immune effector cells;
[0686] 14) an increase in the production of cytokines (e.g., IFNg and/or IL-2) from said population of immune effector cells; or
[0687] 15) a combination of two, three, four, five, six, seven, eight, nine, ten, eleven, twelve, thirteen or more (e.g., all) of the above;

[0688] The increase or decrease can be transient. The increase or decrease can be permanent. The increase or decrease can be as compared with a standard, e.g., cells from an untreated subject.

[0689] In embodiment, immune effector cells, e.g., T cells, are contacted, ex vivo (after removal from the subject or a donor and before introduction into the subject), with an LSD1 inhibitor.

[0690] In an embodiment, the contact is at a level which results in an increase in the number of PD1 negative immune effector, e.g., T cells, or an increase in the ratio of PD1 negative immune effector cells, e.g., T cells/PD1 positive immune effector, e.g., T cells.

[0691] In an embodiment, immune effector cells, e.g., T cells, are contacted, ex vivo (after removal from the subject or a donor and before introduction into the subject), with an LSD1 inhibitor, at a level which results in an increase in the number of naive T cells.

[0692] In an embodiment, immune effector cells, e.g., T cells, are contacted, ex vivo (after removal from the subject or a donor and before introduction into the subject), with an LSD1 inhibitor, at a level which results in one or more of the following:
[0693] 1) an increase in the proportion of naive T cells, e.g., T_{SCM} cells;
[0694] 2) an increase in the number of naive T cells, e.g., T_{SCM} cells;
[0695] 3) a decrease in the number of T_{EM} cells;
[0696] 4) a decrease in the proportion of T_{EM} cells;
[0697] 5) an increase in the proportion of CD45RA+CD62L+ T cells;
[0698] 6) an increase in the number of CD45RA+CD62L+ T cells;
[0699] 7) an increase in the proportion of CD45RA+CCR7+ T cells;
[0700] 8) an increase in the number of CD45RA+CCR7+ T cells;
[0701] 9) a decrease in the proportion of PD-1 positive immune effector cells;
[0702] 10) an increase in the ratio of PD-1 negative immune effector cells/PD-1 positive immune effector cells;
[0703] 11) a decrease in the proportion of PD-1+/Lag3+/Tim3+ immune effector cells;
[0704] 12) an increase in the ratio of PD-1−/Lag3−/Tim3− immune effector cells to PD-1+/Lag3+/Tim3+ immune effector cells;
[0705] 13) an increase in the proliferation of the immune effector cells;
[0706] 14) an increase in the production of cytokines (e.g., IFNg and/or IL-2) from said population of immune effector cells; or
[0707] 15) a combination of two, three, four, five, six, seven, eight, nine, ten, eleven, twelve, thirteen or more (e.g., all) of the above;

[0708] The increase or decrease can be transient. The increase or decrease can be permanent. The increase or decrease can be as compared with a standard, e.g., cells from an untreated subject.

[0709] In an embodiment a preparation of T cells is evaluated for the level of increase in the number of PD1 negative immune effector, e.g., T cells, or an increase in the ratio of PD1 negative immune effector cells, e.g., T cells/PD1 positive immune effector, e.g., T cells.

[0710] In an embodiment, a preparation of T cells is evaluated for the level of increase in the number of naive T cells. In an embodiment, a preparation of T cells is evaluated for one or more of the following:
[0711] 1) an increase in the proportion of naive T cells, e.g., T_{SCM} cells;
[0712] 2) an increase in the number of naive T cells, e.g., T_{SCM} cells;
[0713] 3) a decrease in the number of T_{EM} cells;
[0714] 4) a decrease in the proportion of T_{EM} cells;
[0715] 5) an increase in the proportion of CD45RA+CD62L+ T cells;
[0716] 6) an increase in the number of CD45RA+CD62L+ T cells;
[0717] 7) an increase in the proportion of CD45RA+CCR7+ T cells;
[0718] 8) an increase in the number of CD45RA+CCR7+ T cells;
[0719] 9) a decrease in the proportion of PD-1 positive immune effector cells;
[0720] 10) an increase in the ratio of PD-1 negative immune effector cells/PD-1 positive immune effector cells;
[0721] 11) a decrease in the proportion of PD-1+/Lag3+/Tim3+ immune effector cells;
[0722] 12) an increase in the ratio of PD-1−/Lag3−/Tim3− immune effector cells to PD-1+/Lag3+/Tim3+ immune effector cells;
[0723] 13) an increase in the proliferation of the immune effector cells;
[0724] 14) an increase in the production of cytokines (e.g., IFNg and/or IL-2) from said population of immune effector cells; or
[0725] 15) a combination of two, three, four, five, six, seven, eight, nine, ten, eleven, twelve, thirteen or more (e.g., all) of the above;

[0726] The increase or decrease can be transient. The increase or decrease can be permanent. The increase or decrease can be as compared with a standard, e.g., cells of an untreated subject.

### Pharmaceutical Compositions: LSD1 Inhibitors

[0727] In one aspect, the present invention relates to pharmaceutical compositions comprising an LSD1 inhibitor, e.g., an LSD1 inhibitor as described herein, formulated for use as a medicament.

[0728] In one aspect, the present invention relates to pharmaceutical compositions comprising an LSD1 inhibitor, e.g., an LSD1 inhibitor as described herein, formulated for use in the manufacture of a population of immune effector cells.

[0729] In one aspect, the present invention relates to pharmaceutical compositions comprising an LSD1 inhibitor, e.g., an LSD1 inhibitor as described herein, formulated for use in combination with CAR cells described herein.

[0730] In some embodiments, the LSD1 inhibitor is formulated for administration in combination with another agent, in addition to a CAR cell, e.g., as described herein.

[0731] In general, compounds of the invention will be administered in therapeutically effective amounts as described above via any of the usual and acceptable modes known in the art, either singly or in combination with one or more therapeutic agents.

[0732] The pharmaceutical formulations may be prepared using conventional dissolution and mixing procedures. For example, the bulk drug substance (e.g., an LSD1 inhibitor or stabilized form of the compound (e.g., complex with a cyclodextrin derivative or other known complexation agent) is dissolved in a suitable solvent in the presence of one or more of the excipients described herein. The LSD1 inhibitor is typically formulated into pharmaceutical dosage forms to provide an easily controllable dosage of the drug and to give the patient an elegant and easily handleable product.

[0733] Compounds of the invention can be administered as pharmaceutical compositions by any conventional route, in particular enterally, e.g., orally, e.g., in the form of tablets or capsules, or parenterally, e.g., in the form of injectable solutions or suspensions, topically, e.g., in the form of lotions, gels, ointments or creams, or in a nasal or suppository form. Where an LSD1 inhibitor is administered in combination with (either simultaneously with or separately from) another agent as described herein, in one aspect, both components can be administered by the same route (e.g., parenterally). Alternatively, another agent may be administered by a different route relative to the LSD1 inhibitor. For example, an LSD1 inhibitor may be administered orally and the other agent may be administered parenterally. Pharmaceutical compositions comprising an LSD1 inhibitor in free form or in a pharmaceutically acceptable salt form in association with at least one pharmaceutically acceptable carrier or diluent can be manufactured in a conventional manner by mixing, granulating or coating methods. For example, oral compositions can be tablets or gelatin capsules comprising the active ingredient together with a) diluents, e.g., lactose, dextrose, sucrose, mannitol, sorbitol, cellulose and/or glycine; b) lubricants, e.g., silica, talcum, stearic acid, its magnesium or calcium salt and/or polyethyleneglycol; for tablets also c) binders, e.g., magnesium aluminum silicate, starch paste, gelatin, tragacanth, methylcellulose, sodium carboxymethylcellulose and or polyvinylpyrrolidone; if desired d) disintegrants, e.g., starches, agar, alginic acid or its sodium salt, or effervescent mixtures; and/or e) absorbents, colorants, flavors and sweeteners. Oral formulations can also comprise the active ingredient along with 20-60% Eudragit EPO, Hydroxypropyl cellulose EF, Hydroxypropyl methylcellulose, or Kollidon VA64, and up to 5% of pluronic F68, Cremophor EL, or Gelucire 44/14. Injectable compositions can be aqueous isotonic solutions or suspensions, and suppositories can be prepared from fatty emulsions or suspensions. The compositions may be sterilized and/or contain adjuvants, such as preserving, stabilizing, wetting or emulsifying agents, solution promoters, salts for regulating the osmotic pressure and/or buffers. In addition, they may also contain other therapeutically valuable substances. Suitable formulations for transdermal applications include an effective amount of a compound of the present invention with a carrier. A carrier can include absorbable pharmacologically acceptable solvents to assist passage through the skin of the host. For example, transdermal devices are in the form of a bandage comprising a backing member, a reservoir containing the compound optionally with carriers, optionally a rate controlling barrier to deliver the compound to the skin of the host at a controlled and predetermined rate over a prolonged period of time, and means to secure the device to the skin. Matrix transdermal formulations may also be used. In a further aspect, the LSD1 inhibitors described herein may be administered via a microneedle patch. Microneedle based drug delivery is well known in the art (See, e.g., U.S. Pat. No. 8,162,901) and these technologies and methods may be adapted by one of skill in the art for administration of an LSD1 inhibitor as described herein. Suitable formulations for topical application, e.g., to the skin and eyes, are preferably aqueous solutions, ointments, creams or gels well-known in the art. Such formulations may contain solubilizers, stabilizers, tonicity enhancing agents, buffers and preservatives.

[0734] The pharmaceutical composition (or formulation) for application may be packaged in a variety of ways depending upon the method used for administering the drug. Generally, an article for distribution includes a container having deposited therein the pharmaceutical formulation in an appropriate form. Suitable containers are well-known to those skilled in the art and include materials such as bottles (plastic and glass), sachets, ampoules, plastic bags, metal cylinders, and the like. The container may also include a tamper-proof assemblage to prevent indiscreet access to the contents of the package. In addition, the container has deposited thereon a label that describes the contents of the container. The label may also include appropriate warnings. The invention also provides for a pharmaceutical combinations, e.g. a kit, comprising a) a first agent which is an LSD1 inhibitor as disclosed herein, in free form or in pharmaceutically acceptable salt form, and b) at least one additional agent. The kit can comprise instructions for its administration.

[0735] The term “pharmaceutical combination” as used herein means a product that results from the mixing or combining of more than one active ingredient and includes both fixed and non-fixed combinations of the active ingredients. The term “fixed combination” means that the active ingredients, e.g. an LSD1 inhibitor and other agent, are both administered to a patient simultaneously in the form of a single entity or dosage. The term “non-fixed combination” means that the active ingredients, e.g. an LSD1 inhibitor and other agent, are both administered to a patient as separate entities either simultaneously, concurrently or sequentially with no specific time limits, wherein such administration provides therapeutically effective levels of the 2 compounds in the body of the patient. The latter also applies to cocktail therapy, e.g. the administration of 3 or more active ingredients.

### Chimeric Antigen Receptors

### General Description of Chimeric Antigen Receptor Technology Relevant to the Invention

[0736] Described herein are methods for combining the administration of LSD1 inhibitors with administration of a population of immune effector cells, e.g., T cells or NK cells, engineered to express a CAR molecule, e.g., as described herein (the cell is engineered to express a CAR, and in embodiments, expresses the CAR by the time at which it is administered to the subject. In other embodiments, expression initiates after administration.) In some embodiments, the cell is a T cell engineered to express a CAR molecule, e.g., as described herein, wherein the CAR T cell (“CART”) exhibits an anticancer property. Also described herein are methods for using LSD1 inhibitors for the manufacture, e.g., the activation and/or expansion, a population of immune effector cells, e.g., T cells or NK cells, engineered to express a CAR molecule, e.g., as described herein, wherein the cells have enhanced activity (e.g., proliferation, cytokine release, and/or tumor targeting efficacy) and/or a more naive phenotype, relative to cells manufactured without the use of LSD1 inhibitors. In general, the molecules, cells, methods or other aspects discussed in this section may be useful in the methods, compositions, cells and other aspects of the invention, e.g., in combination with LSD1 inhibitors.

[0737] In general, the invention pertains to an isolated nucleic acid molecule encoding a chimeric antigen receptor (CAR), wherein the CAR comprises an antigen binding domain (e.g., antibody or antibody fragment, TCR or TCR fragment) that binds to a tumor antigen as described herein, a transmembrane domain (e.g., a transmembrane domain described herein), and an intracellular signaling domain (e.g., an intracellular signaling domain described herein) (e.g., an intracellular signaling domain comprising a costimulatory domain (e.g., a costimulatory domain described herein) and/or a primary signaling domain (e.g., a primary signaling domain described herein). In other aspects, the invention includes: host cells containing the above nucleic acids and isolated proteins encoded by such nucleic acid molecules. CAR nucleic acid constructs, encoded proteins, containing vectors, host cells, pharmaceutical compositions, and methods of administration and treatment related to the present invention are disclosed in detail in International Patent Application Publication No. WO2015/142675, which is incorporated by reference in its entirety.

[0738] In one aspect, the invention pertains to an isolated nucleic acid molecule encoding a chimeric antigen receptor (CAR), wherein the CAR comprises an antigen binding domain (e.g., antibody or antibody fragment, TCR or TCR fragment) that binds to a tumor-supporting antigen (e.g., a tumor-supporting antigen as described herein), a transmembrane domain (e.g., a transmembrane domain described herein), and an intracellular signaling domain (e.g., an intracellular signaling domain described herein) (e.g., an intracellular signaling domain comprising a costimulatory domain (e.g., a costimulatory domain described herein) and/or a primary signaling domain (e.g., a primary signaling domain described herein). In some embodiments, the tumor-supporting antigen is an antigen present on a stromal cell or a myeloid-derived suppressor cell (MDSC). In other aspects, the invention features polypeptides encoded by such nucleic acids and host cells containing such nucleic acids and/or polypeptides. In other aspects, the invention features cells (e.g., a population of cells), e.g., immune effector cells, e.g., T cells or NK cells, engineered to express a CAR molecule, e.g., as described herein.

### Targets

[0739] The present invention provides immune effector cells (e.g., T cells, NK cells) that are engineered to contain one or more CARs that direct the immune effector cells to undesired cells (e.g., cancer cells). This is achieved through an antigen binding domain on the CAR that is specific for a cancer associated antigen. There are two classes of cancer associated antigens (tumor antigens) that can be targeted by the CARs of the instant invention: (1) cancer associated antigens that are expressed on the surface of cancer cells; and (2) cancer associated antigens that itself is intracellar, however, a fragment of such antigen (peptide) is presented on the surface of the cancer cells by MHC (major histocompatibility complex).

[0740] In some embodiments, the tumor antigen is chosen from one or more of: CD19; CD123; CD22; CD30; CD171; CS-1 (also referred to as CD2 subset 1, CRACC, SLAMF7, CD319, and 19A24); C-type lectin-like molecule-1 (CLL-1 or CLECL1); CD33; epidermal growth factor receptor variant III (EGFRvIII); ganglioside G2 (GD2); ganglioside GD3 (aNeu5Ac(2-8)aNeu5Ac(2-3)bDGalp(1-4)bDGlcp(1-1)Cer); TNF receptor family member B cell maturation (BCMA); Tn antigen ((Tn Ag) or (GalNAcα-Ser/Thr)); prostate-specific membrane antigen (PSMA); Receptor tyrosine kinase-like orphan receptor 1 (ROR1); Fms-Like Tyrosine Kinase 3 (FLT3); Tumor-associated glycoprotein 72 (TAG72); CD38; CD44v6; Carcinoembryonic antigen (CEA); Epithelial cell adhesion molecule (EPCAM); B7H3 (CD276); KIT (CD117); Interleukin-13 receptor subunit alpha-2 (IL-13Ra2 or CD213A2); Mesothelin; Interleukin 11 receptor alpha (IL-11Ra); prostate stem cell antigen (PSCA); Protease Serine 21 (Testisin or PRSS21); vascular endothelial growth factor receptor 2 (VEGFR2); Lewis (Y) antigen; CD24; Platelet-derived growth factor receptor beta (PDGFR-beta); Stage-specific embryonic antigen-4 (SSEA-4); CD20; Folate receptor alpha; Receptor tyrosine-protein kinase ERBB2 (Her2/neu); Mucin 1, cell surface associated (MUC1); epidermal growth factor receptor (EGFR); neural cell adhesion molecule (NCAM); Prostase; prostatic acid phosphatase (PAP); elongation factor 2 mutated (ELF2M); Ephrin B2; fibroblast activation protein alpha (FAP); insulin-like growth factor 1 receptor (IGF-I receptor), carbonic anhydrase IX (CAIX); Proteasome (Prosome, Macropain) Subunit, Beta Type, 9 (LMP2); glycoprotein 100 (gp100); oncogene fusion protein consisting of breakpoint cluster region (BCR) and Abelson murine leukemia viral oncogene homolog 1 (Abl) (bcr-abl); tyrosinase; ephrin type-A receptor 2 (EphA2); Fucosyl GM1; sialyl Lewis adhesion molecule (sLe); ganglioside GM3 (aNeu5Ac(2-3)bDGalp(1-4)bDGlcp(1-1)Cer); transglutaminase 5 (TGS5); high molecular weight-melanoma-associated antigen (HMWMAA); o-acetyl-GD2 ganglioside (OAcGD2); Folate receptor beta; tumor endothelial marker 1 (TEM1/CD248); tumor endothelial marker 7-related (TEM7R); claudin 6 (CLDN6); thyroid stimulating hormone receptor (TSHR); G protein-coupled receptor class C group 5, member D (GPRC5D); chromosome X open reading frame 61 (CXORF61); CD97; CD179a; anaplastic lymphoma kinase (ALK); Polysialic acid; placenta-specific 1 (PLAC1); hexasaccharide portion of globoH glycoceramide (GloboH); mammary gland differentiation antigen (NY-BR-1); uroplakin 2 (UPK2); Hepatitis A virus cellular receptor 1 (HAVCR1); adrenoceptor beta 3 (ADRB3); pannexin 3 (PANX3); G protein-coupled receptor 20 (GPR20); lymphocyte antigen 6 complex, locus K 9 (LY6K); Olfactory receptor 51E2 (OR5IE2); TCR Gamma Alternate Reading Frame Protein (TARP); Wilms tumor protein (WT1); Cancer/testis antigen 1 (NY-ESO-1); Cancer/testis antigen 2 (LAGE-1a); Melanoma-associated antigen 1 (MAGE-A1); ETS translocation-variant gene 6, located on chromosome 12p (ETV6-AML); sperm protein 17 (SPA17); X Antigen Family, Member 1A (XAGE1); angiopoietin-binding cell surface receptor 2 (Tie 2); melanoma cancertestis antigen-1 (MAD-CT-1); melanoma cancertestis antigen-2 (MAD-CT-2); Fos-related antigen 1; tumor protein p53 (p53); p53 mutant; prostein; surviving; telomerase; prostate carcinoma tumor antigen-1 (PCTA-1 or Galectin 8), melanoma antigen recognized by T cells 1 (MelanA or MART1); Rat sarcoma (Ras) mutant; human Telomerase reverse transcriptase (hTERT); sarcoma translocation breakpoints; melanoma inhibitor of apoptosis (ML-IAP); ERG (transmembrane protease, serine 2 (TMPRSS2) ETS fusion gene); N-Acetyl glucosaminyl-transferase V (NA17); paired box protein Pax-3 (PAX3); Androgen receptor; Cyclin B1; v-myc avian myelocytomatosis viral oncogene neuroblastoma derived homolog (MYCN); Ras Homolog Family Member C (RhoC); Tyrosinase-related protein 2 (TRP-2); Cytochrome P450 1B1 (CYP1B1); CCCTC-Binding Factor (Zinc Finger Protein)-Like (BORIS or Brother of the Regulator of Imprinted Sites), Squamous Cell Carcinoma Antigen Recognized By T Cells 3 (SART3); Paired box protein Pax-5 (PAX5); proacrosin binding protein sp32 (OY-TES1); lymphocyte-specific protein tyrosine kinase (LCK); A kinase anchor protein 4 (AKAP-4); synovial sarcoma, X breakpoint 2 (SSX2); Receptor for Advanced Glycation Endproducts (RAGE-1); renal ubiquitous 1 (RU1); renal ubiquitous 2 (RU2); legumain; human papilloma virus E6 (HPV E6); human papilloma virus E7 (HPV E7); intestinal carboxyl esterase; heat shock protein 70-2 mutated (mut hsp70-2); CD79a; CD79b; CD72; Leukocyte-associated immunoglobulin-like receptor 1 (LAIR1); Fc fragment of IgA receptor (FCAR or CD89); Leukocyte immunoglobulin-like receptor subfamily A member 2 (LILRA2); CD300 molecule-like family member f (CD300LF); C-type lectin domain family 12 member A (CLEC12A); bone marrow stromal cell antigen 2 (BST2); EGF-like module-containing mucin-like hormone receptor-like 2 (EMR2); lymphocyte antigen 75 (LY75); Glypican-3 (GPC3); Fc receptor-like 5 (FCRL5); and immunoglobulin lambda-like polypeptide 1 (IGLL1).

[0741] A CAR described herein can comprise an antigen binding domain (e.g., antibody or antibody fragment, TCR or TCR fragment) that binds to a tumor-supporting antigen (e.g., a tumor-supporting antigen as described herein). In some embodiments, the tumor-supporting antigen is an antigen present on a stromal cell or a myeloid-derived suppressor cell (MDSC). Stromal cells can secrete growth factors to promote cell division in the microenvironment. MDSC cells can inhibit T cell proliferation and activation. Without wishing to be bound by theory, in some embodiments, the CAR-expressing cells destroy the tumor-supporting cells, thereby indirectly inhibiting tumor growth or survival.

[0742] In embodiments, the stromal cell antigen is chosen from one or more of: bone marrow stromal cell antigen 2 (BST2), fibroblast activation protein (FAP) and tenascin. In an embodiment, the FAP-specific antibody is, competes for binding with, or has the same CDRs as, sibrotuzumab. In embodiments, the MDSC antigen is chosen from one or more of: CD33, CD11b, C14, CD15, and CD66b. Accordingly, in some embodiments, the tumor-supporting antigen is chosen from one or more of: bone marrow stromal cell antigen 2 (BST2), fibroblast activation protein (FAP) or tenascin, CD33, CD11b, C14, CD15, and CD66b.

### Antigen Binding Domain Structures

[0743] In some embodiments, the antigen binding domain of the encoded CAR molecule comprises an antibody, an antibody fragment, an scFv, a Fv, a Fab, a (Fab′)2, a single domain antibody (SDAB), a VH or VL domain, a camelid VHH domain or a bi-functional (e.g. bi-specific) hybrid antibody (e.g., Lanzavecchia et al., Eur. J. Immunol. 17, 105 (1987)).

[0744] In some instances, scFvs can be prepared according to method known in the art (see, for example, Bird et al., (1988) Science 242:423-426 and Huston et al., (1988) Proc. Natl. Acad. Sci. USA 85:5879-5883). ScFv molecules can be produced by linking VH and VL regions together using flexible polypeptide linkers. The scFv molecules comprise a linker (e.g., a Ser-Gly linker) with an optimized length and/or amino acid composition. The linker length can greatly affect how the variable regions of a scFv fold and interact. In fact, if a short polypeptide linker is employed (e.g., between 5-10 amino acids) intrachain folding is prevented. Interchain folding is also required to bring the two variable regions together to form a functional epitope binding site. For examples of linker orientation and size see, e.g., Hollinger et al. 1993 Proc Natl Acad. Sci. U.S.A. 90:6444-6448, U.S. Patent Application Publication Nos. 2005/0100543, 2005/0175606, 2007/0014794, and PCT publication Nos. WO2006/020258 and WO2007/024715, is incorporated herein by reference.

[0745] An scFv can comprise a linker of at least 1, 2, 3, 4, 5, 6, 7, 8, 9, 10, 11, 12, 13, 14, 15, 16, 17, 18, 19, 20, 25, 30, 35, 40, 45, 50, or more amino acid residues between its VL and VH regions. The linker sequence may comprise any naturally occurring amino acid. In some embodiments, the linker sequence comprises amino acids glycine and serine. In another embodiment, the linker sequence comprises sets of glycine and serine repeats such as (Gly₄Ser)n, where n is a positive integer equal to or greater than 1 (SEQ ID NO:22). In one embodiment, the linker can be (Gly₄Ser)₄ (SEQ ID NO:29) or (Gly₄Ser)3 (SEQ ID NO:30). Variation in the linker length may retain or enhance activity, giving rise to superior efficacy in activity studies.

[0746] In another aspect, the antigen binding domain is a T cell receptor (“TCR”), or a fragment thereof, for example, a single chain TCR (scTCR). Methods to make such TCRs are known in the art. See, e.g., Willemsen R A et al, Gene Therapy 7: 1369-1377 (2000); Zhang T et al, Cancer Gene Ther 11: 487-496 (2004); Aggen et al, Gene Ther. 19(4):365-74 (2012) (references are incorporated herein by its entirety). For example, scTCR can be engineered that contains the Va and VP genes from a T cell clone linked by a linker (e.g., a flexible peptide). This approach is very useful to cancer associated target that itself is intracellar, however, a fragment of such antigen (peptide) is presented on the surface of the cancer cells by MHC.

[0747] In certain embodiments, the encoded antigen binding domain has a binding affinity KD of 10⁻⁴ M to 10⁻⁸ M.

[0748] In one embodiment, the encoded CAR molecule comprises an antigen binding domain that has a binding affinity KD of 10⁻⁴ M to 10⁻⁸ M, e.g., 10⁻⁵ M to 10⁻⁷ M, e.g., 10⁻⁶ M or 10⁻⁷ M, for the target antigen. In one embodiment, the antigen binding domain has a binding affinity that is at least five-fold, 10-fold, 20-fold, 30-fold, 50-fold, 100-fold or 1,000-fold less than a reference antibody, e.g., an antibody described herein. In one embodiment, the encoded antigen binding domain has a binding affinity at least 5-fold less than a reference antibody (e.g., an antibody from which the antigen binding domain is derived). In one aspect such antibody fragments are functional in that they provide a biological response that can include, but is not limited to, activation of an immune response, inhibition of signal-transduction origination from its target antigen, inhibition of kinase activity, and the like, as will be understood by a skilled artisan.

[0749] In one aspect, the antigen binding domain of the CAR is a scFv antibody fragment that is humanized compared to the murine sequence of the scFv from which it is derived.

[0750] In one aspect, the antigen binding domain of a CAR of the invention (e.g., a scFv) is encoded by a nucleic acid molecule whose sequence has been codon optimized for expression in a mammalian cell. In one aspect, entire CAR construct of the invention is encoded by a nucleic acid molecule whose entire sequence has been codon optimized for expression in a mammalian cell. Codon optimization refers to the discovery that the frequency of occurrence of synonymous codons (i.e., codons that code for the same amino acid) in coding DNA is biased in different species. Such codon degeneracy allows an identical polypeptide to be encoded by a variety of nucleotide sequences. A variety of codon optimization methods is known in the art, and include, e.g., methods disclosed in at least U.S. Pat. Nos. 5,786,464 and 6,114,148.

### Specific Antigen Binding Domains

[0751] In some embodiments, the portion of the CAR comprising the antigen binding domain comprises an antigen binding domain that targets a tumor antigen, e.g., a tumor antigen described herein (e.g., in the section entitled “Targets.” In some embodiments, the tumor antigen is a tumor antigen described in International Application WO2015/142675, filed Mar. 13, 2015, which is herein incorporated by reference in its entirety. Exemplary target antigens that can be targeted using the CAR-expressing cells, include, but are not limited to, CD19, CD123, EGFRvIII, CD33, mesothelin, BCMA, and GFR ALPHA-4, among others, as described in, for example, WO2014/153270, WO 2014/130635, WO2016/028896, WO 2014/130657, WO2016/014576, WO 2015/090230, WO2016/014565, WO2016/014535, and WO2016/025880, each of which is herein incorporated by reference in its entirety.

[0752] In embodiments, the antigen binding domain comprises one, two, three (e.g., all three) heavy chain CDRs, HC CDR1, HC CDR2 and HC CDR3, from an antibody described herein or in any of the publications incorporated by reference herein, and/or one, two, three (e.g., all three) light chain CDRs, LC CDR1, LC CDR2 and LC CDR3, from an antibody described herein or in any of the publications incorporated by reference herein. In one embodiment, the antigen binding domain comprises a heavy chain variable region and/or a variable light chain region of an antibody described herein or in any of the publications incorporated by reference herein. In one embodiment, the antigen binding domain of any of the CAR molecules described herein (e.g., any of CD19, CD123, EGFRvIII, CD33, mesothelin, BCMA, and GFR ALPHA-4) comprises one, two, three (e.g., all three) heavy chain CDRs, HC CDR1, HC CDR2 and HC CDR3, from an antibody described herein or in any of the publications incorporated by reference herein, and/or one, two, three (e.g., all three) light chain CDRs, LC CDR1, LC CDR2 and LC CDR3, from an antigen binding domain described herein or in any of the publications incorporated by reference herein. In one embodiment, the antigen binding domain comprises a heavy chain variable region and/or a variable light chain region of an antibody described herein or in any of the publications incorporated by reference herein.

[0753] In one embodiment, the antigen binding domain comprises one, two three (e.g., all three) heavy chain CDRs, HC CDR1, HC CDR2 and HC CDR3, from an antibody described herein (e.g., an antibody described in WO2015/142675, US-2015-0283178-A1, US-2016-0046724-A1, US2014/0322212A1, US2016/0068601A1, US2016/0051651A1, US2016/0096892A1, US2014/0322275A1, or WO2015/090230, incorporated herein by reference), and/or one, two, three (e.g., all three) light chain CDRs, LC CDR1, LC CDR2 and LC CDR3, from an antibody described herein (e.g., an antibody described in WO2015/142675, US-2015-0283178-A1, US-2016-0046724-A1, US2014/0322212A1, US2016/0068601A1, US2016/0051651A1, US2016/0096892A1, US2014/0322275A1, or WO2015/090230, incorporated herein by reference). In one embodiment, the antigen binding domain comprises a heavy chain variable region and/or a variable light chain region of an antibody described herein. In embodiments, the antigen binding domain is an antigen binding domain described in WO2015/142675, US-2015-0283178-A1, US-2016-0046724-A1, US2014/0322212A1, US2016/0068601A1, US2016/0051651A1, US2016/0096892A1, US2014/0322275A1, or WO2015/090230, incorporated herein by reference.

[0754] In one embodiment, an antigen binding domain against CD19 is an antigen binding portion, e.g., CDRs, of a CAR (e.g., CD19 CAR), antibody or antigen-binding fragment thereof described in, e.g., PCT publication WO2012/079000; PCT publication WO2014/153270; Kochenderfer, J. N. et al., J. Immunother. 32 (7), 689-702 (2009); Kochenderfer, J. N., et al., Blood, 116 (20), 4099-4102 (2010); PCT publication WO2014/031687; Bejcek, Cancer Research, 55, 2346-2351, 1995; or U.S. Pat. No. 7,446,190.

[0755] In one embodiment, the CD19 CAR includes a CAR molecule, or an antigen binding domain (e.g., a humanized antigen binding domain) according to Table 3 of WO2014/153270, incorporated herein by reference. The amino acid and nucleotide sequences encoding the CD19 CAR molecules and antigen binding domains (e.g., including one, two, three VH CDRs; and one, two, three VL CDRs according to Kabat or Chothia), are specified in WO2014/153270. In embodiments, the CD19 CAR, or antigen binding domain, comprises an amino acid, or has a nucleotide sequence shown in WO2014/153270 incorporated herein by reference, or a sequence substantially identical to any of the aforesaid sequences (e.g., at least 85%, 90%, 95% or more identical to any of the aforesaid sequences).

[0756] In another embodiment, the antigen binding domain comprises an anti-CD19 antibody, or fragment thereof, e.g., an scFv. For example, the antigen binding domain comprises a variable heavy chain and a variable light chain listed in Tables 6-9, or a sequence substantially identical to any of the aforesaid sequences (e.g., at least 85%, 90%, 95% or more identical to any of the aforesaid sequences). The linker sequence joining the variable heavy and variable light chains can be, e.g., any of the linker sequences described herein, or alternatively, can be GSTSGSGKPGSGEGSTKG (SEQ ID NO: 871).

TABLE 6
Anti-CD19 antibody binding domains

| | | |
|---|---|---|
| CD19 | huscFv1 | EIVMTQSPATLSLSPGERATLSCRASQDISKYLNWYQQKPGQAPRLLIYHTSRL |
| | (SEQ ID | HSGIPARFSGSGSGTDYTLTISSLQPEDFAVYFCQQGNTLPYTFGQGTKLEIKG |
| | NO: | GGGSGGGGSGGGGSQVQLQESGPGLVKPSETLSLTCTVSGVSLPDYGVSWIRQP |
| | 872) | PGKGLEWIGVIWGSETTYYSSSLKSRVTISKDNSKNQVSLKLSSVTAADTAVYY |
| | | CAKHYYYGGSYAMDYWGQGTLVTVSS |
| CD19 | huscFv2 | Eivmtqspatlslspgeratlscrasqdiskylnwyqqkpgqaprlliyhtsrlhsgip |
| | (SEQ ID | arfsgsgsgtdytltisslqpedfavyfcqqgntlpytfgqgtkleikggggsggggsg |
| | NO: 873) | gggsqvqlqesgpglvkpsetlsltctvsgvslpdygvswirqppgkglewigviwgse |
| | | ttyyqsslksrvtiskdnsknqvslklssvtaadtavyycakhyyyggsyamdywgqgt |
| | | lvtvss |
| CD19 | huscFv3 | Qvqlqesgpglvkpsetlsltctvsgvslpdygvswirqppgkglewigviwgsettyy |
| | (SEQ ID | ssslksrvtiskdnsknqvslklssvtaadtavyycakhyyyggsyamdywgqgtlvtv |
| | NO: 874) | ssggggsggggsggggseivmtqspatlslspgeratlscrasqdiskylnwyqqkpgq |
| | | aprlliyhtsrlhsgiparfsgsgsgtdytltisslqpedfavyfcqqgntlpytfgqg |
| | | tkleik |
| CD19 | huscFv4 | Qvqlqesgpglvkpsetlsltctvsgvslpdygvswirqppgkglewigviwgsettyy |
| | (SEQ ID | qsslksrvtiskdnsknqvslklssvtaadtavyycakhyyyggsyamdywgqgtlvtv |
| | NO: 875) | ssggggsggggsggggseivmtqspatlslspgeratlscrasqdiskylnwyqqkpgq |
| | | aprlliyhtsrlhsgiparfsgsgsgtdytltisslqpedfavyfcqqgntlpytfgqg |
| | | tkleik |
| CD19 | huscFv5 | Eivmtqspatlslspgeratlscrasqdiskylnwyqqkpgqaprlliyhtsrlhsgip |
| | (SEQ ID | arfsgsgsgtdytltisslqpedfavyfcqqgntlpytfgqgtkleikggggsggggsg |
| | NO: 876) | gggsggggsqvqlqesgpglvkpsetlsltctvsgvslpdygvswirqppgkglewigv |
| | | iwgsettyyssslksrvtiskdnsknqvslklssvtaadtavyycakhyyyggsyamdy |
| | | wgqgtlvtvss |
| CD19 | huscFv6 | Eivmtqspatlslspgeratlscrasqdiskylnwyqqkpgqaprlliyhtsrlhsgip |
| | (SEQ ID | arfsgsgsgtdytltisslqpedfavyfcqqgntlpytfgqgtkleikggggsggggsg |
| | NO: 877) | gggsggggsqvqlqesgpglvkpsetlsltctvsgvslpdygvswirqppgkglewigv |
| | | iwgsettyyqsslksrvtiskdnsknqvslklssvtaadtavyycakhyyyggsyamdy |
| | | wgqgtlvtvss |
| CD19 | huscFv7 | Qvqlqesgpglvkpsetlsltctvsgvslpdygvswirqppgkglewigviwgsettyy |
| | (SEQ ID | ssslksrvtiskdnsknqvslklssvtaadtavyycakhyyyggsyamdywgqgtlvtv |
| | NO: 878) | ssggggsggggsggggsggggseivmtqspatlslspgeratlscrasqdiskylnwyq |
| | | qkpgqaprlliyhtsrlhsgiparfsgsgsgtdytltisslqpedfavyfcqqgntlpy |
| | | tfgqgtkleik |
| CD19 | huscFv8 | Qvqlqesgpglvkpsetlsltctvsgvslpdygvswirqppgkglewigviwgsettyy |
| | (SEQ ID | qsslksrvtiskdnsknqvslklssvtaadtavyycakhyyyggsyamdywgqgtlvtv |
| | NO: 879) | ssggggsggggsggggsggggseivmtqspatlslspgeratlscrasqdiskylnwyq |
| | | qkpgqaprlliyhtsrlhsgiparfsgsgsgtdytltisslqpedfavyfcqqgntlpy |
| | | tfgqgtkleik |
| CD19 | huscFv9 | Eivmtqspatlslspgeratlscrasqdiskylnwyqqkpgqaprlliyhtsrlhsgip |
| | (SEQ ID | arfsgsgsgtdytltisslqpedfavyfcqqgntlpytfgqgtkleikggggsggggsg |
| | NO: 880) | gggsggggsqvqlqesgpglvkpsetlsltctvsgvslpdygvswirqppgkglewigv |
| | | iwgsettyynsslksrvtiskdnsknqvslklssvtaadtavyycakhyyyggsyamdy |
| | | wgqgtlvtvss |
| CD19 | HuscFv10 | Qvqlqesgpglvkpsetlsltctvsgvslpdygvswirqppgkglewigviwgsettyy |
| | (SEQ ID | nsslksrvtiskdnsknqvslklssvtaadtavyycakhyyyggsyamdywgqgtlvtv |
| | NO: | ssggggsggggsggggsggggseivmtqspatlslspgeratlscrasqdiskylnwyq |
| | 881) | qkpgqaprlliyhtsrlhsgiparfsgsgsgtdytltisslqpedfavyfcqqgntlpy |
| | | tfgqgtkleik |
| CD19 | HuscFv11 | Eivmtqspatlslspgeratlscrasqdiskylnwyqqkpgqaprlliyhtsrlhsgip |
| | (SEQ ID | arfsgsgsgtdytltisslqpedfavyfcqqgntlpytfgqgtkleikggggsggggsg |
| | NO: 882) | gggsqvqlqesgpglvkpsetlsltctvsgvslpdygvswirqppgkglewigviwgse |
| | | ttyynsslksrvtiskdnsknqvslklssvtaadtavyycakhyyyggsyamdywgqgt |
| | | lvtvss |
| CD19 | HuscFv12 | Qvqlqesgpglvkpsetlsltctvsgvslpdygvswirqppgkglewigviwgsettyy |
| | (SEQ ID | nsslksrvtiskdnsknqvslklssvtaadtavyycakhyyyggsyamdywgqgtlvtv |
| | NO: 883) | ssggggsggggsggggseivmtqspatlslspgeratlscrasqdiskylnwyqqkpgq |
| | | aprlliyhtsrlhsgiparfsgsgsgtdytltisslqpedfavyfcqqgntlpytfgqg |
| | | tkleik |
| CD19 | muCTL019 | Diqmtqttsslsaslgdrvtiscrasqdiskylnwyqqkpdgtvklliyhtsrlhsgvp |
| | (SEQ | srfsgsgsgtdysltisnleqediatyfcqqgntlpytfgggtkleitggggsggggsg |
| | ID NO: | gggsevklqesgpglvapsqslsvtctvsgvslpdygvswirqpprkglewlgviwgse |
| | 884) | ttyynsalksrltiikdnsksqvflkmnslqtddtaiyycakhyyyggsyamdywgqgt |
| | | svtvss |

TABLE 7
Additional anti-CD19 antibody binding domains

| Antibody | VH Sequence | VL Sequence |
|---|---|---|
| SSJ25-C1 | QVQLLESGAELVRPGSSVKISCKASGYAFSS | ELVLTQSPKFMSTSVGDRVSVTCKASQNVGTNVA |
| | YWMNWVKQRPGQGLEWIGQIYPGDGDTNYNG | WYQQKPGQSPKPLIYSATYRNSGVPDRFTGSGSG |
| | KFKGQATLTADKSSSTAYMQLSGLTSEDSAV | TDFTLTITNVQSKDLADYFYFCQYNRYPYTSGGG |
| | YSCARKTISSVVDFYFDYWGQGTTVT (SEQ | TKLEIKRRS (SEQ ID NO: 886) |
| | ID NO: 885) | |

TABLE 8
Additional murine anti-CD19 antibody binding domains

| | | |
|---|---|---|
| mCAR1 scFv | SEQ ID | QVQLLESGAELVRPGSSVKISCKASGYAFSSYWMNWVKQRPGQGLEWIGQIYPGDG |
| | NO: 887 | DTNYNGKFKGQATLTADKSSSTAYMQLSGLTSEDSAVYSCARKTISSVVDFYFDYW |
| | | GQGTTVTGGGSGGGSGGGSGGGSELVLTQSPKFMSTSVGDRVSVTCKASQNVGTNV |
| | | AWYQQKPGQSPKPLIYSATYRNSGVPDRFTGSGSGTDFTLTITNVQSKDLADYFCQ |
| | | YNRYPYTSFFFTKLEIKRRS |
| mCAR2 scFv | SEQ ID | DIQMTQTTSSLSASLGDRVTISCRASQDISKYLNWYQQKPDGTVKLLIYHTSRLHS |
| | NO: 888 | GVPSRFSGSGSGTDYSLTISNLEQEDIATYFCQQGNTLPYTFGGGTKLEITGSTSG |
| | | SGKPGSGEGSTKGEVKLQESGPGLVAPSQSLSVTCTVSGVSLPDYGVSWIRQPPRK |
| | | GLEWLGVIWGSETTYYNSALKSRLTIIKDNSKSQVFLKMNSLQTDDTAIYYCAKHY |
| | | YYGGSYAMDYWGQGTSVTVSSE |
| mCAR3 scFv | SEQ ID | DIQMTQTTSSLSASLGDRVTISCRASQDISKYLNWYQQKPDGTVKLLIYHTSRLHS |
| | NO: 889 | GVPSRFSGSGSGTDYSLTISNLEQEDIATYFCQQGNTLPYTFGGGTKLEITGSTSG |
| | | SGKPGSGEGSTKGEVKLQESGPGLVAPSQSLSVTCTVSGVSLPDYGVSWIRQPPRK |
| | | GLEWLGVIWGSETTYYNSALKSRLTIIKDNSKSQVFLKMNSLQTDDTAIYYCAKHY |
| | | YYGGSYAMDYWGQGTSVTVSS |

[0757] Any CD19 CAR, e.g., the CD19 antigen binding domain of any known CD19 CAR, can be used in accordance with the present disclosure. For example, LG-740; CD19 CAR described in the U.S Pat. Nos. 8,399,645; 7,446,190; Xu et al., Leuk Lymphoma. 2013 54(2):255-260(2012); Cruz et al., Blood 122(17):2965-2973 (2013); Brentjens et al., Blood, 118(18):4817-4828 (2011); Kochenderfer et al., Blood 116(20):4099-102 (2010); Kochenderfer et al., Blood 122 (25):4129-39(2013); and 16th Annu Meet Am Soc Gen Cell Ther (ASGCT) (May 15-18, Salt Lake City) 2013, Abst 10.

[0758] In one embodiment, an antigen binding domain against EGFRvIII is an antigen binding portion, e.g., CDRs, of a CAR, antibody or antigen-binding fragment thereof described in, e.g., PCT publication WO2014/130657 or US2014/0322275A1. In one embodiment, the CAR molecule comprises an EGFRvIII CAR, or an antigen binding domain according to Table 2 or SEQ ID NO: 11 of WO 2014/130657, incorporated herein by reference, or a sequence substantially identical thereto (e.g., at least 85%, 90%, 95% or more identical thereto). The amino acid and nucleotide sequences encoding the EGFRvIII CAR molecules and antigen binding domains (e.g., including one, two, three VH CDRs; and one, two, three VL CDRs according to Kabat or Chothia), are specified in WO 2014/130657.

[0759] In one embodiment, an antigen binding domain against mesothelin is an antigen binding portion, e.g., CDRs, of an antibody, antigen-binding fragment or CAR described in, e.g., PCT publication WO2015/090230. In one embodiment, an antigen binding domain against mesothelin is an antigen binding portion, e.g., CDRs, of an antibody, antigen-binding fragment, or CAR described in, e.g., PCT publication WO1997/025068, WO1999/028471, WO2005/014652, WO2006/099141, WO2009/045957, WO2009/068204, WO2013/142034, WO2013/040557, or WO2013/063419.

[0760] In an embodiment, the CAR molecule comprises a mesothelin CAR described herein, e.g., a mesothelin CAR described in WO 2015/090230, incorporated herein by reference. In embodiments, the mesothelin CAR comprises an amino acid, or has a nucleotide sequence shown in WO 2015/090230 incorporated herein by reference, or a sequence substantially identical to any of the aforesaid sequences (e.g., at least 85%, 90%, 95% or more identical to any of the aforesaid mesothelin CAR sequences). In one embodiment, the CAR molecule comprises a mesothelin CAR, or an antigen binding domain according to Tables 2-3 of WO 2015/090230, incorporated herein by reference, or a sequence substantially identical thereto (e.g., at least 85%, 90%, 95% or more identical thereto). The amino acid and nucleotide sequences encoding the mesothelin CAR molecules and antigen binding domains (e.g., including one, two, three VH CDRs; and one, two, three VL CDRs according to Kabat or Chothia), are specified in WO 2015/090230.

[0761] In one embodiment, an antigen binding domain against CD123 is an antigen binding portion, e.g., CDRs, of an antibody, antigen-binding fragment or CAR described in, e.g., PCT publication WO2016/028896. In one embodiment, an antigen binding domain against CD123 is an antigen binding portion, e.g., CDRs, of an antibody, antigen-binding fragment or CAR described in, e.g., PCT publication WO2014/130635. In one embodiment, an antigen binding domain against CD123 is an antigen binding portion, e.g., CDRs, of an antibody, antigen-binding fragment, or CAR described in, e.g., PCT publication WO2014/138805, WO2014/138819, WO2013/173820, WO2014/144622, WO2001/66139, WO2010/126066, WO2014/144622, or US2009/0252742.

[0762] In one embodiment, an antigen binding domain against CD123 is an antigen binding portion, e.g., CDRs, of an antibody, antigen-binding fragment or CAR described in, e.g., US2014/0322212A1 or US2016/0068601A1, both incorporated herein by reference. In embodiments, the CD123 CAR comprises an amino acid, or has a nucleotide sequence shown in US2014/0322212A1 or US2016/0068601A1, both incorporated herein by reference, or a sequence substantially identical to any of the aforesaid sequences (e.g., at least 85%, 90%, 95% or more identical to any of the aforesaid CD123 CAR sequences). In one embodiment, the CAR molecule comprises a CD123 CAR (e.g., any of the CAR1-CAR8), or an antigen binding domain according to Tables 1-2 of WO 2014/130635, incorporated herein by reference, or a sequence substantially identical thereto (e.g., at least 85%, 90%, 95% or more identical to any of the aforesaid CD123 CAR sequences). The amino acid and nucleotide sequences encoding the CD123 CAR molecules and antigen binding domains (e.g., including one, two, three VH CDRs; and one, two, three VL CDRs according to Kabat or Chothia), are specified in WO 2014/130635.

[0763] In other embodiments, the CAR molecule comprises a CD123 CAR comprises a CAR molecule (e.g., any of the CAR123-1 to CAR123-4 and hzCAR123-1 to hzCAR123-32), or an antigen binding domain according to Tables 2, 6, and 9 of WO2016/028896, incorporated herein by reference, or a sequence substantially identical thereto (e.g., at least 85%, 90%, 95% or more identical to any of the aforesaid CD123 CAR sequences). The amino acid and nucleotide sequences encoding the CD123 CAR molecules and antigen binding domains (e.g., including one, two, three VH CDRs; and one, two, three VL CDRs according to Kabat or Chothia), are specified in WO2016/028896.

[0764] In one embodiment, an antigen binding domain against CD22 is an antigen binding portion, e.g., CDRs, of an antibody described in, e.g., Haso et al., Blood, 121(7): 1165-1174 (2013); Wayne et al., Clin Cancer Res 16(6): 1894-1903 (2010); Kato et al., Leuk Res 37(1):83-88 (2013); Creative BioMart (creativebiomart.net): MOM-18047-S(P).

[0765] In one embodiment, an antigen binding domain against CS-1 is an antigen binding portion, e.g., CDRs, of Elotuzumab (BMS), see e.g., Tai et al., 2008, Blood 112(4):1329-37; Tai et al., 2007, Blood. 110(5):1656-63.

[0766] In one embodiment, an antigen binding domain against CLL-1 is an antigen binding portion, e.g., CDRs, of an antibody available from R&D, ebiosciences, Abcam, for example, PE-CLL1-hu Cat #353604 (BioLegend); and PE-CLL1 (CLECI2A) Cat #562566 (BD).

[0767] In other embodiments, the CLL1 CAR includes a CAR molecule, or an antigen binding domain according to Table 2 of WO2016/014535, incorporated herein by reference. The amino acid and nucleotide sequences encoding the CLL-1 CAR molecules and antigen binding domains (e.g., including one, two, three VH CDRs; and one, two, three VL CDRs according to Kabat or Chothia), are specified in WO2016/014535.

[0768] In one embodiment, an antigen binding domain against CD33 is an antigen binding portion, e.g., CDRs, of an antibody described in, e.g., Bross et al., Clin Cancer Res 7(6):1490-1496 (2001) (Gemtuzumab Ozogamicin, hP67.6), Caron et al., Cancer Res 52(24):6761-6767 (1992) (Lintuzumab, HuM195), Lapusan et al., Invest New Drugs 30(3):1121-1131 (2012) (AVE9633), Aigner et al., Leukemia 27(5): 1107-1115 (2013) (AMG330, CD33 BiTE), Dutour et al., Adv hematol 2012:683065 (2012), and Pizzitola et al., Leukemia doi:10.1038/Lue.2014.62 (2014).

[0769] In one embodiment, an antigen binding domain against CD33 is an antigen binding portion, e.g., CDRs, of an antibody described in, US2016/0096892A1, incorporated herein by reference. In embodiments, the CD33 CAR comprises an amino acid, or has a nucleotide sequence shown in US2016/0096892A1, incorporated herein by reference, or a sequence substantially identical to any of the aforesaid sequences (e.g., at least 85%, 90%, 95% or more identical to any of the aforesaid CD33 CAR sequences). In other embodiments, the CD33 CAR CAR or antigen binding domain thereof can include a CAR molecule (e.g., any of CAR33-1 to CAR-33-9), or an antigen binding domain according to Table 2 or 9 of WO2016/014576, incorporated herein by reference, or a sequence substantially identical to any of the aforesaid sequences (e.g., at least 85%, 90%, 95% or more identical to any of the aforesaid CD33 CAR sequences). The amino acid and nucleotide sequences encoding the CD33 CAR molecules and antigen binding domains (e.g., including one, two, three VH CDRs; and one, two, three VL CDRs according to Kabat or Chothia), are specified in WO2016/014576.

[0770] In one embodiment, an antigen binding domain against GD2 is an antigen binding portion, e.g., CDRs, of an antibody described in, e.g., Mujoo et al., Cancer Res. 47(4):1098-1104 (1987); Cheung et al., Cancer Res 45(6):2642-2649 (1985), Cheung et al., J Clin Oncol 5(9):1430-1440 (1987), Cheung et al., J Clin Oncol 16(9):3053-3060 (1998), Handgretinger et al., Cancer Immunol Immunother 35(3):199-204 (1992). In some embodiments, an antigen binding domain against GD2 is an antigen binding portion of an antibody selected from mAb 14.18, 14G2a, ch14.18, hu14.18, 3F8, hu3F8, 3G6, 8B6, 60C3, 10B8, ME36.1, and 8H9, see e.g., WO2012033885, WO2013040371, WO2013192294, WO2013061273, WO2013123061, WO2013074916, and WO201385552. In some embodiments, an antigen binding domain against GD2 is an antigen binding portion of an antibody described in US Publication No.: 20100150910 or PCT Publication No.: WO 2011160119.

[0771] In one embodiment, an antigen binding domain against BCMA is an antigen binding portion, e.g., CDRs, of an antibody, antigen-binding fragment or CAR described in, e.g., PCT publication WO2016/014565, e.g., the antigen binding portion of CAR BCMA-10 as described in WO2016/014565. In one embodiment, an antigen binding domain against BCMA is an antigen binding portion, e.g., CDRs, of an antibody, antigen-binding fragment or CAR described in, e.g., PCT publication WO2016/014789. In one embodiment, an antigen binding domain against BCMA is an antigen binding portion, e.g., CDRs, of an antibody described in, e.g., WO2012/163805, WO2001/12812, and WO2003/062401.

[0772] In other embodiment, the CAR molecule comprises a BCMA CAR molecule, or an antigen binding domain against BCMA described herein, e.g., a BCMA CAR described in US-2016-0046724-A1 or WO2016/014565. In embodiments, the BCMA CAR comprises an amino acid, or has a nucleotide sequence of a CAR molecule, or an antigen binding domain according to US-2016-0046724-A1, or Table 1 or 16, SEQ ID NO: 271 or SEQ ID NO: 273 of WO2016/014565, incorporated herein by reference, or a sequence substantially identical to any of the aforesaid sequences (e.g., at least 85%, 90%, 95% or more identical to any of the aforesaid BCMA CAR sequences). The amino acid and nucleotide sequences encoding the BCMA CAR molecules and antigen binding domains (e.g., including one, two, three VH CDRs; and one, two, three VL CDRs according to Kabat or Chothia), are specified in WO2016/014565.

[0773] In one embodiment, an antigen binding domain against GFR ALPHA-4 CAR antigen is an antigen binding portion, e.g., CDRs, of an antibody described in, e.g., WO2016/025880, incorporated herein by reference. In one embodiment, the CAR molecule comprises an a GFR ALPHA-4 CAR, e.g., a CAR molecule, or an antigen binding domain according to Table 2 of WO2016/025880, incorporated herein by reference, or a sequence substantially identical to any of the aforesaid sequences (e.g., at least 85%, 90%, 95% or more identical to any of the aforesaid GFR ALPHA-4 sequences). The amino acid and nucleotide sequences encoding the GFR ALPHA-4 CAR molecules and antigen binding domains (e.g., including one, two, three VH CDRs; and one, two, three VL CDRs according to Kabat or Chothia), are specified in WO2016/025880.

[0774] In one embodiment, an antigen binding domain against Tn antigen is an antigen binding portion, e.g., CDRs, of an antibody described in, e.g., U.S. Pat. No. 8,440,798; Brooks et al., PNAS 107(22):10056-10061 (2010), and Stone et al., OncoImmunology 1(6):863-873(2012).

[0775] In one embodiment, an antigen binding domain against PSMA is an antigen binding portion, e.g., CDRs, of an antibody described in, e.g., Parker et al., Protein Expr Purif 89(2):136-145 (2013), US 20110268656 (J591 ScFv); Frigerio et al, European J Cancer 49(9):2223-2232 (2013) (scFvD2B); WO 2006125481 (mAbs 3/A12, 3/E7 and 3/F11) and single chain antibody fragments (scFv A5 and D7).

[0776] In one embodiment, an antigen binding domain against ROR1 is an antigen binding portion, e.g., CDRs, of an antibody described in, e.g., Hudecek et al., Clin Cancer Res 19(12):3153-3164 (2013); WO 2011159847; and US20130101607.

[0777] In one embodiment, an antigen binding domain against FLT3 is an antigen binding portion, e.g., CDRs, of an antibody described in, e.g., WO2011076922, U.S. Pat. No. 5,777,084, EP0754230, US20090297529, and several commercial catalog antibodies (R&D, ebiosciences, Abcam).

[0778] In one embodiment, an antigen binding domain against TAG72 is an antigen binding portion, e.g., CDRs, of an antibody described in, e.g., Hombach et al., Gastroenterology 113(4):1163-1170 (1997); and Abcam ab691.

[0779] In one embodiment, an antigen binding domain against FAP is an antigen binding portion, e.g., CDRs, of an antibody described in, e.g., Ostermann et al., Clinical Cancer Research 14:4584-4592 (2008) (FAP5), US Pat. Publication No. 2009/0304718; sibrotuzumab (see e.g., Hofheinz et al., Oncology Research and Treatment 26(1), 2003); and Tran et al., J Exp Med 210(6):1125-1135 (2013).

[0780] In one embodiment, an antigen binding domain against CD38 is an antigen binding portion, e.g., CDRs, of daratumumab (see, e.g., Groen et al., Blood 116(21):1261-1262 (2010); MOR202 (see, e.g., U.S. Pat. No. 8,263,746); or antibodies described in U.S. Pat. No. 8,362,211.

[0781] In one embodiment, an antigen binding domain against CD44v6 is an antigen binding portion, e.g., CDRs, of an antibody described in, e.g., Casucci et al., Blood 122(20):3461-3472 (2013).

[0782] In one embodiment, an antigen binding domain against CEA is an antigen binding portion, e.g., CDRS, of an antibody described in, e.g., Chmielewski et al., Gastoenterology 143(4):1095-1107 (2012).

[0783] In one embodiment, an antigen binding domain against EPCAM is an antigen binding portion, e.g., CDRS, of an antibody selected from MT110, EpCAM-CD3 bispecific Ab (see, e.g., clinicaltrials.gov/ct2/show/NCT00635596); Edrecolomab; 3622W94; ING-1; and adecatumumab (MT201).

[0784] In one embodiment, an antigen binding domain against PRSS21 is an antigen binding portion, e.g., CDRs, of an antibody described in U.S. Pat. No. 8,080,650.

[0785] In one embodiment, an antigen binding domain against B7H3 is an antigen binding portion, e.g., CDRs, of an antibody MGA271 (Macrogenics).

[0786] In one embodiment, an antigen binding domain against KIT is an antigen binding portion, e.g., CDRS, of an antibody described in, e.g., U.S. Pat. No. 7,915,391, US20120288506, and several commercial catalog antibodies.

[0787] In one embodiment, an antigen binding domain against IL-13Ra2 is an antigen binding portion, e.g., CDRs, of an antibody described in, e.g., WO2008/146911, WO2004087758, several commercial catalog antibodies, and WO2004087758.

[0788] In one embodiment, an antigen binding domain against CD30 is an antigen binding portion, e.g., CDRS, of an antibody described in, e.g., U.S. Pat. No. 7,090,843 B1, and EP0805871.

[0789] In one embodiment, an antigen binding domain against GD3 is an antigen binding portion, e.g., CDRs, of an antibody described in, e.g., U.S. Pat. Nos. 7,253,263; 8,207,308; US 20120276046; EP1013761; WO2005035577; and U.S. Pat. No. 6,437,098.

[0790] In one embodiment, an antigen binding domain against CD171 is an antigen binding portion, e.g., CDRS, of an antibody described in, e.g., Hong et al., J Immunother 37(2):93-104 (2014).

[0791] In one embodiment, an antigen binding domain against IL-11Ra is an antigen binding portion, e.g., CDRs, of an antibody available from Abcam (cat #ab55262) or Novus Biologicals (cat #EPR5446). In another embodiment, an antigen binding domain again IL-11Ra is a peptide, see, e.g., Huang et al., Cancer Res 72(1):271-281 (2012).

[0792] In one embodiment, an antigen binding domain against PSCA is an antigen binding portion, e.g., CDRs, of an antibody described in, e.g., Morgenroth et al., Prostate 67(10):1121-1131 (2007) (scFv 7F5); Nejatollahi et al., J of Oncology 2013(2013), article ID 839831 (scFv C5-II); and US Pat Publication No. 20090311181.

[0793] In one embodiment, an antigen binding domain against VEGFR2 is an antigen binding portion, e.g., CDRs, of an antibody described in, e.g., Chinnasamy et al., J Clin Invest 120(11):3953-3968 (2010).

[0794] In one embodiment, an antigen binding domain against LewisY is an antigen binding portion, e.g., CDRs, of an antibody described in, e.g., Kelly et al., Cancer Biother Radiopharm 23(4):411-423 (2008) (hu3S193 Ab (scFvs)); Dolezal et al., Protein Engineering 16(1):47-56 (2003) (NC10 scFv).

[0795] In one embodiment, an antigen binding domain against CD24 is an antigen binding portion, e.g., CDRs, of an antibody described in, e.g., Maliar et al., Gastroenterology 143(5):1375-1384 (2012).

[0796] In one embodiment, an antigen binding domain against PDGFR-beta is an antigen binding portion, e.g., CDRs, of an antibody Abcam ab32570.

[0797] In one embodiment, an antigen binding domain against SSEA-4 is an antigen binding portion, e.g., CDRs, of antibody MC813 (Cell Signaling), or other commercially available antibodies.

[0798] In one embodiment, an antigen binding domain against CD20 is an antigen binding portion, e.g., CDRs, of the antibody Rituximab, Ofatumumab, Ocrelizumab, Veltuzumab, or GA101.

[0799] In one embodiment, an antigen binding domain against Folate receptor alpha is an antigen binding portion, e.g., CDRs, of the antibody IMGN853, or an antibody described in US20120009181; U.S. Pat. No. 4,851,332, LK26: U.S. Pat. No. 5,952,484.

[0800] In one embodiment, an antigen binding domain against ERBB2 (Her2/neu) is an antigen binding portion, e.g., CDRs, of the antibody trastuzumab, or pertuzumab.

[0801] In one embodiment, an antigen binding domain against MUC1 is an antigen binding portion, e.g., CDRs, of the antibody SAR566658.

[0802] In one embodiment, the antigen binding domain against EGFR is antigen binding portion, e.g., CDRs, of the antibody cetuximab, panitumumab, zalutumumab, nimotuzumab, or matuzumab.

[0803] In one embodiment, an antigen binding domain against NCAM is an antigen binding portion, e.g., CDRs, of the antibody clone 2-2B: MAB5324 (EMD Millipore).

[0804] In one embodiment, an antigen binding domain against Ephrin B2 is an antigen binding portion, e.g., CDRs, of an antibody described in, e.g., Abengozar et al., Blood 119(19):4565-4576 (2012).

[0805] In one embodiment, an antigen binding domain against IGF-I receptor is an antigen binding portion, e.g., CDRs, of an antibody described in, e.g., U.S. Pat. No. 8,344,112 B2; EP2322550 A1; WO 2006/138315, or PCT/US2006/022995.

[0806] In one embodiment, an antigen binding domain against CAIX is an antigen binding portion, e.g., CDRs, of the antibody clone 303123 (R&D Systems).

[0807] In one embodiment, an antigen binding domain against LMP2 is an antigen binding portion, e.g., CDRs, of an antibody described in, e.g., U.S. Pat. No. 7,410,640, or US20050129701.

[0808] In one embodiment, an antigen binding domain against gp100 is an antigen binding portion, e.g., CDRs, of the antibody HMB45, NKIbetaB, or an antibody described in WO2013165940, or US20130295007 In one embodiment, an antigen binding domain against tyrosinase is an antigen binding portion, e.g., CDRs, of an antibody described in, e.g., U.S. Pat. No. 5,843,674; or U.S. Ser. No. 19/950,504048.

[0809] In one embodiment, an antigen binding domain against EphA2 is an antigen binding portion, e.g., CDRs, of an antibody described in, e.g., Yu et al., Mol Ther 22(1):102-111 (2014).

[0810] In one embodiment, an antigen binding domain against GD3 is an antigen binding portion, e.g., CDRs, of an antibody described in, e.g., U.S. Pat. Nos. 7,253,263; 8,207,308; US 20120276046; EP1013761 A3; 20120276046; WO2005035577; or U.S. Pat. No. 6,437,098.

[0811] In one embodiment, an antigen binding domain against fucosyl GM1 is an antigen binding portion, e.g., CDRs, of an antibody described in, e.g., US20100297138; or WO2007/067992.

[0812] In one embodiment, an antigen binding domain against sLe is an antigen binding portion, e.g., CDRs, of the antibody G193 (for lewis Y), see Scott A M et al, Cancer Res 60: 3254-61 (2000), also as described in Neeson et al, J Immunol May 2013 190 (Meeting Abstract Supplement) 177.10.

[0813] In one embodiment, an antigen binding domain against GM3 is an antigen binding portion, e.g., CDRs, of the antibody CA 2523449 (mAb 14F7).

[0814] In one embodiment, an antigen binding domain against HMWMAA is an antigen binding portion, e.g., CDRs, of an antibody described in, e.g., Kmiecik et al., Oncoimmunology 3(1):e27185 (2014) (PMID: 24575382) (mAb9.2.27); U.S. Pat. No. 6,528,481; WO2010033866; or US 20140004124.

[0815] In one embodiment, an antigen binding domain against o-acetyl-GD2 is an antigen binding portion, e.g., CDRs, of the antibody 8B6.

[0816] In one embodiment, an antigen binding domain against TEM1/CD248 is an antigen binding portion, e.g., CDRs, of an antibody described in, e.g., Marty et al., Cancer Lett 235(2):298-308 (2006); Zhao et al., J Immunol Methods 363(2):221-232 (2011).

[0817] In one embodiment, an antigen binding domain against CLDN6 is an antigen binding portion, e.g., CDRs, of the antibody IMAB027 (Ganymed Pharmaceuticals), see e.g., clinicaltrial.gov/show/NCT02054351.

[0818] In one embodiment, an antigen binding domain against TSHR is an antigen binding portion, e.g., CDRs, of an antibody described in, e.g., U.S. Pat. Nos. 8,603,466; 8,501,415; or U.S. Pat. No. 8,309,693.

[0819] In one embodiment, an antigen binding domain against GPRC5D is an antigen binding portion, e.g., CDRs, of the antibody FAB6300A (R&D Systems); or LS-A4180 (Lifespan Biosciences).

[0820] In one embodiment, an antigen binding domain against CD97 is an antigen binding portion, e.g., CDRs, of an antibody described in, e.g., U.S. Pat. No. 6,846,911; de Groot et al., J Immunol 183(6):4127-4134 (2009); or an antibody from R&D:MAB3734.

[0821] In one embodiment, an antigen binding domain against ALK is an antigen binding portion, e.g., CDRs, of an antibody described in, e.g., Mino-Kenudson et al., Clin Cancer Res 16(5):1561-1571 (2010).

[0822] In one embodiment, an antigen binding domain against polysialic acid is an antigen binding portion, e.g., CDRs, of an antibody described in, e.g., Nagae et al., J Biol Chem 288(47):33784-33796 (2013).

[0823] In one embodiment, an antigen binding domain against PLAC1 is an antigen binding portion, e.g., CDRs, of an antibody described in, e.g., Ghods et al., Biotechnol Appl Biochem 2013 doi:10.1002/bab.1177.

[0824] In one embodiment, an antigen binding domain against GloboH is an antigen binding portion of the antibody VK9; or an antibody described in, e.g., Kudryashov V et al, Glycoconj J.15(3):243-9 (1998), Lou et al., Proc Natl Acad Sci USA 111(7):2482-2487 (2014); MBrl: Bremer E-G et al. J Biol Chem 259:14773-14777 (1984).

[0825] In one embodiment, an antigen binding domain against NY-BR-1 is an antigen binding portion, e.g., CDRs of an antibody described in, e.g., Jager et al., Appl Immunohistochem Mol Morphol 15(1):77-83 (2007).

[0826] In one embodiment, an antigen binding domain against WT-1 is an antigen binding portion, e.g., CDRs, of an antibody described in, e.g., Dao et al., Sci Transl Med 5(176):176ra33 (2013); or WO2012/135854.

[0827] In one embodiment, an antigen binding domain against MAGE-A1 is an antigen binding portion, e.g., CDRs, of an antibody described in, e.g., Willemsen et al., J Immunol 174(12):7853-7858 (2005) (TCR-like scFv).

[0828] In one embodiment, an antigen binding domain against sperm protein 17 is an antigen binding portion, e.g., CDRs, of an antibody described in, e.g., Song et al., Target Oncol 2013 Aug. 14 (PMID: 23943313); Song et al., Med Oncol 29(4):2923-2931 (2012).

[0829] In one embodiment, an antigen binding domain against Tie 2 is an antigen binding portion, e.g., CDRs, of the antibody AB33 (Cell Signaling Technology).

[0830] In one embodiment, an antigen binding domain against MAD-CT-2 is an antigen binding portion, e.g., CDRs, of an antibody described in, e.g., PMID: 2450952; U.S. Pat. No. 7,635,753.

[0831] In one embodiment, an antigen binding domain against Fos-related antigen 1 is an antigen binding portion, e.g., CDRs, of the antibody 12F9 (Novus Biologicals).

[0832] In one embodiment, an antigen binding domain against MelanA/MART1 is an antigen binding portion, e.g., CDRs, of an antibody described in, EP2514766 A2; or U.S. Pat. No. 7,749,719.

[0833] In one embodiment, an antigen binding domain against sarcoma translocation breakpoints is an antigen binding portion, e.g., CDRs, of an antibody described in, e.g., Luo et al, EMBO Mol. Med. 4(6):453-461 (2012).

[0834] In one embodiment, an antigen binding domain against TRP-2 is an antigen binding portion, e.g., CDRs, of an antibody described in, e.g., Wang et al, J Exp Med. 184(6):2207-16 (1996).

[0835] In one embodiment, an antigen binding domain against CYP1B1 is an antigen binding portion, e.g., CDRs, of an antibody described in, e.g., Maecker et al, Blood 102 (9): 3287-3294 (2003).

[0836] In one embodiment, an antigen binding domain against RAGE-1 is an antigen binding portion, e.g., CDRs, of the antibody MAB5328 (EMD Millipore).

[0837] In one embodiment, an antigen binding domain against human telomerase reverse transcriptase is an antigen binding portion, e.g., CDRs, of the antibody cat no: LS-B95-100 (Lifespan Biosciences)

[0838] In one embodiment, an antigen binding domain against intestinal carboxyl esterase is an antigen binding portion, e.g., CDRs, of the antibody 4F12: cat no: LS-B6190-50 (Lifespan Biosciences).

[0839] In one embodiment, an antigen binding domain against mut hsp70-2 is an antigen binding portion, e.g., CDRs, of the antibody Lifespan Biosciences: monoclonal: cat no: LS-C133261-100 (Lifespan Biosciences).

[0840] In one embodiment, an antigen binding domain against CD79a is an antigen binding portion, e.g., CDRs, of the antibody Anti-CD79a antibody [HM47/A9](ab3121), available from Abcam; antibody CD79A Antibody #3351 available from Cell Signalling Technology; or antibody HPA017748—Anti-CD79A antibody produced in rabbit, available from Sigma Aldrich.

[0841] In one embodiment, an antigen binding domain against CD79b is an antigen binding portion, e.g., CDRs, of the antibody polatuzumab vedotin, anti-CD79b described in Doman et al., “Therapeutic potential of an anti-CD79b antibody-drug conjugate, anti-CD79b-vc-MMAE, for the treatment of non-Hodgkin lymphoma” Blood. 2009 Sep. 24; 114(13):2721-9. doi: 10.1182/blood-2009-02-205500. Epub 2009 Jul. 24, or the bispecific antibody Anti-CD79b/CD3 described in “4507 Pre-Clinical Characterization of T Cell-Dependent Bispecific Antibody Anti-CD79b/CD3 As a Potential Therapy for B Cell Malignancies” Abstracts of 56^{th} ASH Annual Meeting and Exposition, San Francisco, CA Dec. 6-9 2014.

[0842] In one embodiment, an antigen binding domain against CD72 is an antigen binding portion, e.g., CDRs, of the antibody J3-109 described in Myers, and Uckun, “An anti-CD72 immunotoxin against therapy-refractory B-lineage acute lymphoblastic leukemia.” Leuk Lymphoma. 1995 June; 18(1-2):119-22, or anti-CD72 (10D6.8.1, mIgG1) described in Polson et al., “Antibody-Drug Conjugates for the Treatment of Non-Hodgkin's Lymphoma: Target and Linker-Drug Selection” Cancer Res Mar. 15, 2009 69; 2358.

[0843] In one embodiment, an antigen binding domain against LAIR1 is an antigen binding portion, e.g., CDRs, of the antibody ANT-301 LAIR1 antibody, available from ProSpec; or anti-human CD305 (LAIR1) Antibody, available from BioLegend.

[0844] In one embodiment, an antigen binding domain against FCAR is an antigen binding portion, e.g., CDRs, of the antibody CD89/FCARAntibody (Catalog #10414-H08H), available from Sino Biological Inc.

[0845] In one embodiment, an antigen binding domain against LILRA2 is an antigen binding portion, e.g., CDRs, of the antibody LILRA2 monoclonal antibody (M17), clone 3C7, available from Abnova, or Mouse Anti-LILRA2 antibody, Monoclonal (2D7), available from Lifespan Biosciences.

[0846] In one embodiment, an antigen binding domain against CD300LF is an antigen binding portion, e.g., CDRs, of the antibody Mouse Anti-CMRF35-like molecule 1 antibody, Monoclonal[UP-D2], available from BioLegend, or Rat Anti-CMRF35-like molecule 1 antibody, Monoclonal[234903], available from R&D Systems.

[0847] In one embodiment, an antigen binding domain against CLEC12A is an antigen binding portion, e.g., CDRs, of the antibody Bispecific T cell Engager (BiTE) scFv-antibody and ADC described in Noordhuis et al., “Targeting of CLEC12A In Acute Myeloid Leukemia by Antibody-Drug-Conjugates and Bispecific CLL-1×CD3 BiTE Antibody” 53^{rd} ASH Annual Meeting and Exposition, Dec. 10-13, 2011, and MCLA-117 (Merus).

[0848] In one embodiment, an antigen binding domain against BST2 (also called CD317) is an antigen binding portion, e.g., CDRs, of the antibody Mouse Anti-CD317 antibody, Monoclonal[3H4], available from Antibodies-Online or Mouse Anti-CD317 antibody, Monoclonal[696739], available from R&D Systems.

[0849] In one embodiment, an antigen binding domain against EMR2 (also called CD312) is an antigen binding portion, e.g., CDRs, of the antibody Mouse Anti-CD312 antibody, Monoclonal[LS-B8033] available from Lifespan Biosciences, or Mouse Anti-CD312 antibody, Monoclonal[494025] available from R&D Systems.

[0850] In one embodiment, an antigen binding domain against LY75 is an antigen binding portion, e.g., CDRs, of the antibody Mouse Anti-Lymphocyte antigen 75 antibody, Monoclonal[HD30] available from EMD Millipore or Mouse Anti-Lymphocyte antigen 75 antibody, Monoclonal[A15797] available from Life Technologies.

[0851] In one embodiment, an antigen binding domain against GPC3 is an antigen binding portion, e.g., CDRs, of the antibody hGC33 described in Nakano K, Ishiguro T, Konishi H, et al. Generation of a humanized anti-glypican 3 antibody by CDR grafting and stability optimization. Anticancer Drugs. 2010 November; 21(10):907-916, or MDX-1414, HN3, or YP7, all three of which are described in Feng et al., “Glypican-3 antibodies: a new therapeutic target for liver cancer.” FEBS Lett. 2014 Jan. 21; 588(2):377-82.

[0852] In one embodiment, an antigen binding domain against FCRL5 is an antigen binding portion, e.g., CDRs, of the anti-FcRL5 antibody described in Elkins et al., “FcRL5 as a target of antibody-drug conjugates for the treatment of multiple myeloma” Mol Cancer Ther. 2012 October; 11(10):2222-32.

[0853] In one embodiment, an antigen binding domain against IGLL1 is an antigen binding portion, e.g., CDRs, of the antibody Mouse Anti-Immunoglobulin lambda-like polypeptide 1 antibody, Monoclonal[AT1G4] available from Lifespan Biosciences, Mouse Anti-Immunoglobulin lambda-like polypeptide 1 antibody, Monoclonal[HSL11] available from BioLegend.

[0854] In one embodiment, the antigen binding domain comprises one, two three (e.g., all three) heavy chain CDRs, HC CDR1, HC CDR2 and HC CDR3, from an antibody listed above, and/or one, two, three (e.g., all three) light chain CDRs, LC CDR1, LC CDR2 and LC CDR3, from an antibody listed above. In one embodiment, the antigen binding domain comprises a heavy chain variable region and/or a variable light chain region of an antibody listed above.

[0855] In another aspect, the antigen binding domain comprises a humanized antibody or an antibody fragment. In some aspects, a non-human antibody is humanized, where specific sequences or regions of the antibody are modified to increase similarity to an antibody naturally produced in a human or fragment thereof. In one aspect, the antigen binding domain is humanized.

### Bispecific CARs

[0856] In certain embodiments, the antigen binding domain is a bi- or multi-specific molecule (e.g., a multispecific antibody molecule). In an embodiment a multispecific antibody molecule is a bispecific antibody molecule. A bispecific antibody has specificity for no more than two antigens. A bispecific antibody molecule is characterized by a first immunoglobulin variable domain sequence which has binding specificity for a first epitope and a second immunoglobulin variable domain sequence that has binding specificity for a second epitope. In an embodiment the first and second epitopes are on the same antigen, e.g., the same protein (or subunit of a multimeric protein). In an embodiment the first and second epitopes overlap. In an embodiment the first and second epitopes do not overlap. In an embodiment the first and second epitopes are on different antigens, e.g., different proteins (or different subunits of a multimeric protein). In an embodiment a bispecific antibody molecule comprises a heavy chain variable domain sequence and a light chain variable domain sequence which have binding specificity for a first epitope and a heavy chain variable domain sequence and a light chain variable domain sequence which have binding specificity for a second epitope. In an embodiment a bispecific antibody molecule comprises a half antibody having binding specificity for a first epitope and a half antibody having binding specificity for a second epitope. In an embodiment a bispecific antibody molecule comprises a half antibody, or fragment thereof, having binding specificity for a first epitope and a half antibody, or fragment thereof, having binding specificity for a second epitope. In an embodiment a bispecific antibody molecule comprises a scFv, or fragment thereof, have binding specificity for a first epitope and a scFv, or fragment thereof, have binding specificity for a second epitope.

[0857] In certain embodiments, the antibody molecule is a multi-specific (e.g., a bispecific or a trispecific) antibody molecule. Such molecules include bispecific fusion proteins, e.g., an expression construct containing two scFvs with a hydrophilic helical peptide linker between them and a full constant region, as described in, e.g., U.S. Pat. No. 5,637,481; minibody constructs with linked VL and VH chains further connected with peptide spacers to an antibody hinge region and CH3 region, which can be dimerized to form bispecific/multivalent molecules, as described in, e.g., U.S. Pat. No. 5,837,821; String of VH domains (or VL domains in family members) connected by peptide linkages with crosslinkable groups at the C-terminus further associated with VL domains to form a series of FVs (or scFvs), as described in, e.g., U.S. Pat. No. 5,864,019; and single chain binding polypeptides with both a VH and a VL domain linked through a peptide linker are combined into multivalent structures through non-covalent or chemical crosslinking to form, e.g., homobivalent, heterobivalent, trivalent, and tetravalent structures using both scFV or diabody type format, as described in, e.g., U.S. Pat. No. 5,869,620. The contents of the above-referenced applications are incorporated herein by reference in their entireties.

[0858] Within each antibody or antibody fragment (e.g., scFv) of a bispecific antibody molecule, the VH can be upstream or downstream of the VL. In some embodiments, the upstream antibody or antibody fragment (e.g., scFv) is arranged with its VH (VH₁) upstream of its VL (VL₁) and the downstream antibody or antibody fragment (e.g., scFv) is arranged with its VL (VL₂) upstream of its VH (VH₂), such that the overall bispecific antibody molecule has the arrangement VH₁-VL₁-VL₂-VH₂. In other embodiments, the upstream antibody or antibody fragment (e.g., scFv) is arranged with its VL (VL₁) upstream of its VH (VH₁) and the downstream antibody or antibody fragment (e.g., scFv) is arranged with its VH (VH₂) upstream of its VL (VL₂), such that the overall bispecific antibody molecule has the arrangement VL₁-VH₁-VH₂-VL₂. Optionally, a linker is disposed between the two antibodies or antibody fragments (e.g., scFvs), e.g., between VL₁ and VL₂ if the construct is arranged as VH₁-VL₁-VL₂-VH₂, or between VH₁ and VH₂ if the construct is arranged as VL₁-VH₁-VH₂-VL₂. The linker may be a linker as described herein, e.g., a (Gly₄-Ser)n linker, wherein n is 1, 2, 3, 4, 5, or 6, preferably 4 (SEQ ID NO: 890). In general, the linker between the two scFvs should be long enough to avoid mispairing between the domains of the two scFvs. Optionally, a linker is disposed between the VL and VH of the first scFv. Optionally, a linker is disposed between the VL and VH of the second scFv. In constructs that have multiple linkers, any two or more of the linkers can be the same or different. Accordingly, in some embodiments, a bispecific CAR comprises VLs, VHs, and optionally one or more linkers in an arrangement as described herein.

### Transmembrane Domains

[0859] With respect to the transmembrane domain, in various embodiments, a chimeric molecule of the invention (e.g., a CAR) can be designed to comprise a transmembrane domain that is attached to the extracellular domain of the chimeric molecule. A transmembrane domain can include one or more additional amino acids adjacent to the transmembrane region, e.g., one or more amino acid associated with the extracellular region of the protein from which the transmembrane was derived (e.g., 1, 2, 3, 4, 5, 6, 7, 8, 9, 10 up to 15 amino acids of the extracellular region) and/or one or more additional amino acids associated with the intracellular region of the protein from which the transmembrane protein is derived (e.g., 1, 2, 3, 4, 5, 6, 7, 8, 9, 10 up to 15 amino acids of the intracellular region). In one aspect, the transmembrane domain is one that is associated with one of the other domains of the chimeric protein (e.g., CAR) e.g., in one embodiment, the transmembrane domain may be from the same protein that the signaling domain, costimulatory domain or the hinge domain is derived from. In another aspect, the transmembrane domain is not derived from the same protein that any other domain of the chimeric protein (e.g., CAR) is derived from. In some instances, the transmembrane domain can be selected or modified by amino acid substitution to avoid binding of such domains to the transmembrane domains of the same or different surface membrane proteins, e.g., to minimize interactions with other members of the receptor complex. In one aspect, the transmembrane domain is capable of homodimerization with another CAR on the cell surface of a CAR-expressing cell. In a different aspect, the amino acid sequence of the transmembrane domain may be modified or substituted so as to minimize interactions with the binding domains of the native binding partner present in the same CAR-expressing cell.

[0860] The transmembrane domain may be derived either from a natural or from a recombinant source. Where the source is natural, the domain may be derived from any membrane-bound or transmembrane protein. In one aspect the transmembrane domain is capable of signaling to the intracellular domain(s) whenever the CAR has bound to a target. A transmembrane domain of particular use in this invention may include at least the transmembrane region(s) of e.g., the alpha, beta or zeta chain of the T-cell receptor, CD28, CD27, CD3 epsilon, CD45, CD4, CD5, CD8, CD9, CD16, CD22, CD33, CD37, CD64, CD80, CD86, CD134, CD137, CD154. In some embodiments, a transmembrane domain may include at least the transmembrane region(s) of, e.g., KIRDS2, OX40, CD2, CD27, LFA-1 (CD11a, CD18), ICOS (CD278), 4-1BB (CD137), GITR, CD40, BAFFR, HVEM (LIGHTR), SLAMF7, NKp80 (KLRF1), NKp44, NKp30, NKp46, CD160, CD19, IL2Rbeta, IL2Rgamma, IL7R a, ITGA1, VLA1, CD49a, ITGA4, IA4, CD49D, ITGA6, VLA-6, CD49f, ITGAD, CD11d, ITGAE, CD103, ITGAL, CD11a, LFA-1, ITGAM, CD11b, ITGAX, CD11c, ITGB1, CD29, ITGB2, CD18, LFA-1, ITGB7, TNFR2, DNAM1 (CD226), SLAMF4 (CD244, 2B4), CD84, CD96 (Tactile), CEACAMI, CRTAM, Ly9 (CD229), CD160 (BY55), PSGL1, CD100 (SEMA4D), SLAMF6 (NTB-A, Ly108), SLAM (SLAMFI, CD150, IPO-3), BLAME (SLAMF8), SELPLG (CD162), LTBR, PAG/Cbp, NKG2D, or NKG2C.

[0861] In some instances, the transmembrane domain can be attached to the extracellular region of the CAR, e.g., the antigen binding domain of the CAR, via a hinge, e.g., a hinge from a human protein. For example, in one embodiment, the hinge can be a human Ig (immunoglobulin) hinge (e.g., an IgG4 hinge, an IgD hinge), a GS linker (e.g., a GS linker described herein), a KIR2DS2 hinge or a CD8a hinge. In one embodiment, the hinge or spacer comprises (e.g., consists of) the amino acid sequence of SEQ ID NO: 4. In one aspect, the transmembrane domain comprises (e.g., consists of) a transmembrane domain of SEQ ID NO: 12.

[0862] In certain embodiments, the encoded transmembrane domain comprises an amino acid sequence of a CD8 transmembrane domain having at least one, two or three modifications but not more than 20, 10 or 5 modifications of an amino acid sequence of SEQ ID NO: 12, or a sequence with 95-99% identity to an amino acid sequence of SEQ ID NO: 12. In one embodiment, the encoded transmembrane domain comprises the sequence of SEQ ID NO: 12.

[0863] In other embodiments, the nucleic acid molecule encoding the CAR comprises a nucleotide sequence of a CD8 transmembrane domain, e.g., comprising the sequence of SEQ ID NO: 13, or a sequence with 95-99% identity thereof.

[0864] In certain embodiments, the encoded antigen binding domain is connected to the transmembrane domain by a hinge region. In one embodiment, the encoded hinge region comprises the amino acid sequence of a CD8 hinge, e.g., SEQ ID NO: 4; or the amino acid sequence of an IgG4 hinge, e.g., SEQ ID NO: 6, or a sequence with 95-99% identity to SEQ ID NO:4 or 6. In other embodiments, the nucleic acid sequence encoding the hinge region comprises a sequence of SEQ ID NO: 5 or SEQ ID NO: 7, corresponding to a CD8 hinge or an IgG4 hinge, respectively, or a sequence with 95-99% identity to SEQ ID NO:5 or 7.

[0865] In one aspect, the hinge or spacer comprises an IgG4 hinge. For example, in one embodiment, the hinge or spacer comprises a hinge of the amino acid sequence:

(SEQ ID NO: 6)
ESKYGPPCPPCPAPEFLGGPSVFLFPPKPKDTLMISRTPEVTCVVVDVSQ
EDPEVQFNWYVDGVEVHNAKTKPREEQFNSTYRVVSVLTVLHQDWLNGKE
YKCKVSNKGLPSSIEKTISKAKGQPREPQVYTLPPSQEEMTKNQVSLTCL
VKGFYPSDIAVEWESNGQPENNYKTTPPVLDSDGSFFLYSRLTVDKSRWQ
EGNVFSCSVMHEALHNHYTQKSLSLSLGKM.

[0866] In some embodiments, the hinge or spacer comprises a hinge encoded by a nucleotide sequence of:

(SEQ ID NO: 7)
GAGAGCAAGTACGGCCCTCCCTGCCCCCCTTGCCCTGCCCCCGAGTTCCT
GGGCGGACCCAGCGTGTTCCTGTTCCCCCCCAAGCCCAAGGACACCCTGA
TGATCAGCCGGACCCCCGAGGTGACCTGTGTGGTGGTGGACGTGTCCCAG
GAGGACCCCGAGGTCCAGTTCAACTGGTACGTGGACGGCGTGGAGGTGCA
CAACGCCAAGACCAAGCCCCGGGAGGAGCAGTTCAATAGCACCTACCGGG
TGGTGTCCGTGCTGACCGTGCTGCACCAGGACTGGCTGAACGGCAAGGAA
TACAAGTGTAAGGTGTCCAACAAGGGCCTGCCCAGCAGCATCGAGAAAAC
CATCAGCAAGGCCAAGGGCCAGCCTCGGGAGCCCCAGGTGTACACCCTGC
CCCCTAGCCAAGAGGAGATGACCAAGAACCAGGTGTCCCTGACCTGCCTG
GTGAAGGGCTTCTACCCCAGCGACATCGCCGTGGAGTGGGAGAGCAACGG
CCAGCCCGAGAACAACTACAAGACCACCCCCCCTGTGCTGGACAGCGACG
GCAGCTTCTTCCTGTACAGCCGGCTGACCGTGGACAAGAGCCGGTGGCAG
GAGGGCAACGTCTTTAGCTGCTCCGTGATGCACGAGGCCCTGCACAACCA
CTACACCCAGAAGAGCCTGAGCCTGTCCCTGGGCAAGATG.

[0867] In one aspect, the hinge or spacer comprises an IgD hinge. For example, in one embodiment, the hinge or spacer comprises a hinge of the amino acid sequence

(SEQ ID NO: 8)
RWPESPKAQASSVPTAQPQAEGSLAKATTAPATTRNTGRGGEEKKKEKEK
EEQEERETKTPECPSHTQPLGVYLLTPAVQDLWLRDKATFTCFVVGSDLK
DAHLTWEVAGKVPTGGVEEGLLERHSNGSQSQHSRLTLPRSLWNAGTSVT
CTLNHPSLPPQRLMALREPAAQAPVKLSLNLLASSDPPEAASWLLCEVSG
FSPPNILLMWLEDQREVNTSGFAPARPPPQPGSTTFWAWSVLRVPAPPSP
QPATYTCVVSHEDSRTLLNASRSLEVSYVTDH.

[0868] In some embodiments, the hinge or spacer comprises a hinge encoded by a nucleotide sequence of:

(SEQ ID NO: 9)
AGGTGGCCCGAAAGTCCCAAGGCCCAGGCATCTAGTGTTCCTACTGCACA
GCCCCAGGCAGAAGGCAGCCTAGCCAAAGCTACTACTGCACCTGCCACTA
CGCGCAATACTGGCCGTGGCGGGGAGGAGAAGAAAAAGGAGAAAGAGAAA
GAAGAACAGGAAGAGAGGGAGACCAAGACCCCTGAATGTCCATCCCATAC
CCAGCCGCTGGGCGTCTATCTCTTGACTCCCGCAGTACAGGACTTGTGGC
TTAGAGATAAGGCCACCTTTACATGTTTCGTCGTGGGCTCTGACCTGAAG
GATGCCCATTTGACTTGGGAGGTTGCCGGAAAGGTACCCACAGGGGGGGT
TGAGGAAGGGTTGCTGGAGCGCCATTCCAATGGCTCTCAGAGCCAGCACT
CAAGACTCACCCTTCCGAGATCCCTGTGGAACGCCGGGACCTCTGTCACA
TGTACTCTAAATCATCCTAGCCTGCCCCCACAGCGTCTGATGGCCCTTAG
AGAGCCAGCCGCCCAGGCACCAGTTAAGCTTAGCCTGAATCTGCTCGCCA
GTAGTGATCCCCCAGAGGCCGCCAGCTGGCTCTTATGCGAAGTGTCCGGC
TTTAGCCCGCCCAACATCTTGCTCATGTGGCTGGAGGACCAGCGAGAAGT
GAACACCAGCGGCTTCGCTCCAGCCCGGCCCCCACCCCAGCCGGGTTCTA
CCACATTCTGGGCCTGGAGTGTCTTAAGGGTCCCAGCACCACCTAGCCCC
CAGCCAGCCACATACACCTGTGTTGTGTCCCATGAAGATAGCAGGACCCT
GCTAAATGCTTCTAGGAGTCTGGAGGTTTCCTACGTGACTGACCATT.

[0869] In one aspect, the transmembrane domain may be recombinant, in which case it will comprise predominantly hydrophobic residues such as leucine and valine. In one aspect a triplet of phenylalanine, tryptophan and valine can be found at each end of a recombinant transmembrane domain.

[0870] Optionally, a short oligo- or polypeptide linker, between 2 and 10 amino acids in length may form the linkage between the transmembrane domain and the cytoplasmic region of the CAR. A glycine-serine doublet provides a particularly suitable linker. For example, in one aspect, the linker comprises the amino acid sequence of GGGGSGGGGS (SEQ ID NO: 10). In some embodiments, the linker is encoded by a nucleotide sequence of GGTGGCGGAGGTTCTGGAGGTGGAGGTTCC (SEQ ID NO: 11).

[0871] In one aspect, the hinge or spacer comprises a KIR2DS2 hinge.

### Signaling Domains

[0872] In embodiments of the invention having an intracellular signaling domain, such a domain can contain, e.g., one or more of a primary signaling domain and/or a costimulatory signaling domain. In some embodiments, the intracellular signaling domain comprises a sequence encoding a primary signaling domain. In some embodiments, the intracellular signaling domain comprises a costimulatory signaling domain. In some embodiments, the intracellular signaling domain comprises a a primary signaling domain and a costimulatory signaling domain.

[0873] The intracellular signaling sequences within the cytoplasmic portion of the CAR of the invention may be linked to each other in a random or specified order. Optionally, a short oligo- or polypeptide linker, for example, between 2 and 10 amino acids (e.g., 2, 3, 4, 5, 6, 7, 8, 9, or 10 amino acids) in length may form the linkage between intracellular signaling sequences. In one embodiment, a glycine-serine doublet can be used as a suitable linker. In one embodiment, a single amino acid, e.g., an alanine, a glycine, can be used as a suitable linker.

[0874] In one aspect, the intracellular signaling domain is designed to comprise two or more, e.g., 2, 3, 4, 5, or more, costimulatory signaling domains. In an embodiment, the two or more, e.g., 2, 3, 4, 5, or more, costimulatory signaling domains, are separated by a linker molecule, e.g., a linker molecule described herein. In one embodiment, the intracellular signaling domain comprises two costimulatory signaling domains. In some embodiments, the linker molecule is a glycine residue. In some embodiments, the linker is an alanine residue.

### Primary Signaling Domains

[0875] A primary signaling domain regulates primary activation of the TCR complex either in a stimulatory way, or in an inhibitory way. Primary intracellular signaling domains that act in a stimulatory manner may contain signaling motifs which are known as immunoreceptor tyrosine-based activation motifs or ITAMs.

[0876] Examples of ITAM containing primary intracellular signaling domains that are of particular use in the invention include those of CD3 zeta, common FcR gamma (FCER1G), Fc gamma RIIa, FcR beta (Fc Epsilon R1b), CD3 gamma, CD3 delta, CD3 epsilon, CD79a, CD79b, DAP10, and DAP12. In one embodiment, a CAR of the invention comprises an intracellular signaling domain, e.g., a primary signaling domain of CD3-zeta.

[0877] In one embodiment, the encoded primary signaling domain comprises a functional signaling domain of CD3 zeta. The encoded CD3 zeta primary signaling domain can comprise an amino acid sequence having at least one, two or three modifications but not more than 20, 10 or 5 modifications of an amino acid sequence of SEQ ID NO: 18 or SEQ ID NO: 20, or a sequence with 95-99% identity to an amino acid sequence of SEQ ID NO: 18 or SEQ ID NO: 20. In some embodiments, the encoded primary signaling domain comprises a sequence of SEQ ID NO: 18 or SEQ ID NO: 20. In other embodiments, the nucleic acid sequence encoding the primary signaling domain comprises a sequence of SEQ ID NO:19 or SEQ ID NO: 21, or a sequence with 95-99% identity thereof.

### Costimulatory Signaling Domains

[0878] In some embodiments, the encoded intracellular signaling domain comprises a a costimulatory signaling domain. For example, the intracellular signaling domain can comprise a primary signaling domain and a costimulatory signaling domain. In some embodiments, the encoded costimulatory signaling domain comprises a functional signaling domain of a protein chosen from one or more of CD27, CD28, 4-1BB (CD137), OX40, CD30, CD40, PD-1, ICOS, lymphocyte function-associated antigen-1 (LFA-1), CD2, CD7, LIGHT, NKG2C, B7-H3, a ligand that specifically binds with CD83, CDS, ICAM-1, GITR, BAFFR, HVEM (LIGHTR), SLAMF7, NKp80 (KLRF1), CD160, CD19, CD4, CD8alpha, CD8beta, IL2R beta, IL2R gamma, IL7R alpha, ITGA4, VLA1, CD49a, ITGA4, IA4, CD49D, ITGA6, VLA-6, CD49f, ITGAD, CD11d, ITGAE, CD103, ITGAL, CD11a, LFA-1, ITGAM, CD11b, ITGAX, CD11c, ITGB1, CD29, ITGB2, CD18, LFA-1, ITGB7, TNFR2, TRANCE/RANKL, DNAM1 (CD226), SLAMF4 (CD244, 2B4), CD84, CD96 (Tactile), CEACAMI, CRTAM, Ly9 (CD229), CD160 (BY55), PSGL1, CD100 (SEMA4D), CD69, SLAMF6 (NTB-A, Ly108), SLAM (SLAMFI, CD150, IPO-3), BLAME (SLAMF8), SELPLG (CD162), LTBR, LAT, GADS, SLP-76, PAG/Cbp, NKp44, NKp30, NKp46, and NKG2D.

[0879] In certain embodiments, the encoded costimulatory signaling domain comprises an amino acid sequence having at least one, two or three modifications but not more than 20, 10 or 5 modifications of an amino acid sequence of SEQ ID NO: 14 or SEQ ID NO: 16, or a sequence with 95-99% identity to an amino acid sequence of SEQ ID NO: 14 or SEQ ID NO: 16. In one embodiment, the encoded costimulatory signaling domain comprises a sequence of SEQ ID NO: 14 or SEQ ID NO: 16. In other embodiments, the nucleic acid sequence encoding the costimulatory signaling domain comprises a sequence of SEQ ID NO: 15 or SEQ ID NO: 17, or a sequence with 95-99% identity thereof.

[0880] In other embodiments, the encoded intracellular domain comprises the sequence of SEQ ID NO: 14 or SEQ ID NO: 16, and the sequence of SEQ ID NO: 18 or SEQ ID NO: 20, wherein the sequences comprising the intracellular signaling domain are expressed in the same frame and as a single polypeptide chain.

[0881] In certain embodiments, the nucleic acid sequence encoding the intracellular signaling domain comprises a sequence of SEQ ID NO: 15 or SEQ ID NO: 17, or a sequence with 95-99% identity thereof, and a sequence of SEQ ID NO: 19 or SEQ ID NO:21, or a sequence with 95-99% identity thereof.

[0882] In some embodiments, the nucleic acid molecule further encodes a leader sequence. In one embodiment, the leader sequence comprises the sequence of SEQ ID NO: 2.

[0883] In one aspect, the intracellular signaling domain is designed to comprise the signaling domain of CD3-zeta and the signaling domain of CD28. In one aspect, the intracellular signaling domain is designed to comprise the signaling domain of CD3-zeta and the signaling domain of 4-1BB. In one aspect, the signaling domain of 4-1BB is a signaling domain of SEQ ID NO: 14. In one aspect, the signaling domain of CD3-zeta is a signaling domain of SEQ ID NO: 18.

[0884] In one aspect, the intracellular signaling domain is designed to comprise the signaling domain of CD3-zeta and the signaling domain of CD27. In one aspect, the signaling domain of CD27 comprises an amino acid sequence of QRRKYRSNKGESPVEPAEPCRYSCPREEEGSTIPIQEDYRKPEPACSP (SEQ ID NO: 16). In one aspect, the signaling domain of CD27 is encoded by a nucleic acid sequence of:

(SEQ ID NO: 17)
AGGAGTAAGAGGAGCAGGCTCCTGCACAGTGACTACATGAACATGACTCC
CCGCCGCCCCGGGCCCACCCGCAAGCATTACCAGCCCTATGCCCCACCAC
GCGACTTCGCAGCCTATCGCTCC.

### Exemplary CAR Molecules

[0885] The CAR molecules disclosed herein can comprise a binding domain that binds to a target, e.g., a target as described herein; a transmembrane domain, e.g., a transmembrane domain as described herein; and an intracellular signaling domain, e.g., an intracellular domain as described herein. In embodiments, the binding domain comprises a heavy chain complementary determining region 1 (HC CDR1), a heavy chain complementary determining region 2 (HC CDR2), and a heavy chain complementary determining region 3 (HC CDR3) of a heavy chain binding domain described herein, and/or a light chain complementary determining region 1 (LC CDR1), a light chain complementary determining region 2 (LC CDR2), and a light chain complementary determining region 3 (LC CDR3) of a light chain binding domain described herein.

[0886] In other embodiments, the CAR molecule comprises a CD19 CAR molecule described herein, e.g., a CD19 CAR molecule described in US-2015-0283178-A1, e.g., CTL019. In embodiments, the CD19 CAR comprises an amino acid, or has a nucleotide sequence shown in US-2015-0283178-A1, incorporated herein by reference, or a sequence substantially identical thereto (e.g., at least 85%, 90%, 95% or more identical thereto).

[0887] In one embodiment, the CAR T cell that specifically binds to CD19 has the USAN designation TISAGENLECLEUCEL-T. CTL019 is made by a gene modification of T cells is mediated by stable insertion via transduction with a self-inactivating, replication deficient Lentiviral (LV) vector containing the CTL019 transgene under the control of the EF-1 alpha promoter. CTL019 can be a mixture of transgene positive and negative T cells that are delivered to the subject on the basis of percent transgene positive T cells.

[0888] In other embodiments, the CD19 CAR includes a CAR molecule, or an antigen binding domain (e.g., a humanized antigen binding domain) according to Table 3 of WO2014/153270, incorporated herein by reference. The amino acid and nucleotide sequences encoding the CD19 CAR molecules and antigen binding domains (e.g., including one, two, three VH CDRs; and one, two, three VL CDRs according to Kabat or Chothia), are specified in WO2014/153270. In embodiments, the CD19 CAR comprises an amino acid, or has a nucleotide sequence shown in WO2014/153270 incorporated herein by reference, or a sequence substantially identical to any of the aforesaid sequences (e.g., at least 85%, 90%, 95% or more identical to any of the aforesaid CD19 CAR sequences).

[0889] In one embodiment, the parental murine scFv sequence is the CAR19 construct provided in PCT publication WO2012/079000 (incorporated herein by reference) and provided herein in Table 9. In one embodiment, the anti-CD19 binding domain is a scFv described in WO2012/079000 and provided herein in Table 9.

[0890] In one embodiment, the CD19 CAR comprises an amino acid sequence provided as SEQ ID NO: 12 in PCT publication WO2012/079000. In embodiment, the amino acid sequence is:

(SEQ ID NO: 891)
MALPVTALLLPLALLLHAARPdiqmtqttsslsaslgdrvtiscrasqdi
skylnwyqqkpdgtvklliyhtsrlhsgvpsrfsgsgsgtdysltisnle
qediatyfcqqgntlpytfgggtkleitggggsggggsggggsevklqes
gpglvapsqslsvtctvsgvslpdygvswirqpprkglewlgviwgsett
yynsalksrltiikdnsksqvflkmnslqtddtaiyycakhyyyggsyam
dywgqgtsvtvsstttpaprpptpaptiasqplslrpeacrpaaggavht
rgldfacdiyiwaplagtcgvlllslvitlyckrgrkkllyifkqpfmrp
vqttqeedgcscrfpeeeeggcelrvkfsrsadapaykqgqnqlynelnl
grreeydvldkrrgrdpemggkprrknpqeglynelqkdkmaeayseigm
kgerrrgkghdglyqglstatkdtydalhmqalppr,

or a sequence substantially identical thereto (e.g., at least 85%, 90% or 95% or higher identical thereto), with or without the signal peptide sequence indicated in capital letters.
   In embodiment, the amino acid sequence is:

(SEQ ID NO: 892)
diqmtqttsslsaslgdrvtiscrasqdiskylnwyqqkpdgtvklliy
htsrlhsgvpsrfsgsgsgtdysltisnleqediatyfcqqgntlpytf
gggtkleitggggggggsggggsevklqesgpglvapsqslsvtctvsg
vslpdygvswirqpprkglewlgviwgsettyynsalksrltiikdnsk
sqvflkmnslqtddtaiyycakhyyyggsyamdywgqgtsvtvsstttp
aprpptpaptiasqplslrpeacrpaaggavhtrgldfacdiyiwapla
gtcgvlllslvitlyckrgrkkllyifkqpfmrpvqttqeedgescrfp
eeeeggcelrvkfsrsadapaykqgqnqlynelnlgrreeydvldkrrg
rdpemggkprrknpqeglynelqkdkmaeayseigmkgerrrgkghdgl
yqglstatkdtydalhmqalppr,

or a sequence substantially homologous thereto (e.g., at least 85%, 90% or 95% or higher identical thereto).

[0891] In embodiments, the CAR molecule is a CD19 CAR molecule described herein, e.g., a humanized CAR molecule described herein, e.g., a humanized CD19 CAR molecule of Table 6-9 or having CDRs as set out in Tables 10A and 10B.

[0892] In embodiments, the CAR molecule is a CD19 CAR molecule described herein, e.g., a murine CAR molecule described herein, e.g., a murine CD19 CAR molecule of Table 9 or having CDRs as set out in Tables 10A and 10B.

[0893] In some embodiments, the CAR molecule comprises one, two, and/or three CDRs from the heavy chain variable region and/or one, two, and/or three CDRs from the light chain variable region of the murine or humanized CD19 CAR of Table 10A and 10B.

[0894] In one embodiment, the antigen binding domain comprises one, two three (e.g., all three) heavy chain CDRs, HC CDR1, HC CDR2 and HC CDR3, from an antibody listed herein, and/or one, two, three (e.g., all three) light chain CDRs, LC CDR1, LC CDR2 and LC CDR3, from an antibody listed herein. In one embodiment, the antigen binding domain comprises a heavy chain variable region and/or a variable light chain region of an antibody listed or described herein.

[0895] Exemplary CD19 CARs include any of the CD19 CARs or anti-CD19 binding domains described herein, e.g., in one or more tables (e.g., Tables 6-9) described herein (e.g., or an anti-CD19 CAR described in Xu et al. Blood 123.24(2014):3750-9; Kochenderfer et al. Blood 122.25(2013):4129-39, Cruz et al. Blood 122.17(2013):2965-73, NCT00586391, NCT01087294, NCT02456350, NCT00840853, NCT02659943, NCT02650999, NCT02640209, NCT01747486, NCT02546739, NCT02656147, NCT02772198, NCT00709033, NCT02081937, NCT00924326, NCT02735083, NCT02794246, NCT02746952, NCT01593696, NCT02134262, NCT01853631, NCT02443831, NCT02277522, NCT02348216, NCT02614066, NCT02030834, NCT02624258, NCT02625480, NCT02030847, NCT02644655, NCT02349698, NCT02813837, NCT02050347, NCT01683279, NCT02529813, NCT02537977, NCT02799550, NCT02672501, NCT02819583, NCT02028455, NCT01840566, NCT01318317, NCT01864889, NCT02706405, NCT01475058, NCT01430390, NCT02146924, NCT02051257, NCT02431988, NCT01815749, NCT02153580, NCT01865617, NCT02208362, NCT02685670, NCT02535364, NCT02631044, NCT02728882, NCT02735291, NCT01860937, NCT02822326, NCT02737085, NCT02465983, NCT02132624, NCT02782351, NCT01493453, NCT02652910, NCT02247609, NCT01029366, NCT01626495, NCT02721407, NCT01044069, NCT00422383, NCT01680991, NCT02794961, or NCT02456207, each of which is incorporated herein by reference in its entirety.

[0896] Exemplary CD19 CAR and antigen binding domain constructs that can be used in the methods described herein are shown in Tables 6-9. The light and heavy chain CDR sequences according to Kabat are shown by the bold and underlined text, and are also summarized in Tables 9 and 10A-10B below. The location of the signal sequence and histidine tag are also underlined. In embodiments, the CD19 CAR sequences and antigen binding fragments thereof do not include the signal sequence and/or histidine tag sequences.

[0897] In embodiments, the CD19 CAR comprises an anti-CD19 binding domain (e.g., murine or humanized anti-CD19 binding domain), a transmembrane domain, and an intracellular signaling domain, and wherein said anti-CD19 binding domain comprises a heavy chain complementary determining region 1 (HC CDR1), a heavy chain complementary determining region 2 (HC CDR2), and a heavy chain complementary determining region 3 (HC CDR3) of any anti-CD19 heavy chain binding domain amino acid sequences listed in Tables 6-9 and 10A-10B, or a sequence at least 85%, 90%, 95% or more identical thereto (e.g., having less than 5, 4, 3, 2 or 1 amino acid substitutions, e.g., conservative substitutions).

[0898] In one embodiment, the anti-CD19 binding domain comprises a light chain variable region described herein (e.g., in Tables 6-9) and/or a heavy chain variable region described herein (e.g., in Table 9), or a sequence at least 85%, 90%, 95% or more identical thereto.

[0899] In one embodiment, the encoded anti-CD19 binding domain is a scFv comprising a light chain and a heavy chain of an amino acid sequence of Tables 6-9, or a sequence at least 85%, 90%, 95% or more identical thereto.

[0900] In an embodiment, the human or humanized anti-CD19 binding domain (e.g., an scFv) comprises: a light chain variable region comprising an amino acid sequence having at least one, two or three modifications (e.g., substitutions, e.g., conservative substitutions) but not more than 30, 20 or 10 modifications (e.g., substitutions, e.g., conservative substitutions) of an amino acid sequence of a light chain variable region provided in Tables 6-9, or a sequence at least 85%, 90%, 95% or more identical thereto; and/or a heavy chain variable region comprising an amino acid sequence having at least one, two or three modifications (e.g., substitutions, e.g., conservative substitutions) but not more than 30, 20 or 10 modifications (e.g., substitutions, e.g., conservative substitutions) of an amino acid sequence of a heavy chain variable region provided in Tables 6-9, or a sequence at least 85%, 90%, 95% or more identical thereto.

TABLE 9
CD19 CAR Constructs

| | | |
|---|---|---|
| | SEQ ID | |
| Name | NO: | Sequence |

CAR 1

| | | |
|---|---|---|
| CAR 1 scFv | 893 | EIVMTQSPATLSLSPGERATLSCRASQDISKYLNWYQQKPGQAPRLLIYHT |
| domain | | SRLHSGIPARFSGSGSGTDYTLTISSLQPEDFAVYFCQQGNTLPYTFGQGT |
| | | KLEIKGGGGSGGGGSGGGGSQVQLQESGPGLVKPSETLSLTCTVSGVSLPD |
| | | YGVSWIRQPPGKGLEWIGVIWGSETTYYSSSLKSRVTISKDNSKNQVSLKL |
| | | SSVTAADTAVYYCAKHYYYGGSYAMDYWGQGTLVTVSS |
| 103101 | 894 | atggccctccctgtcaccgccctgctgcttccgctggctcttctgctccacgccgc |
| CAR 1 | | tcggcccgaaattgtgatgacccagtcacccgccactcttagcctttcacccggtg |
| Soluble scFv- | | agcgcgcaaccctgtcttgcagagcctcccaagacatctcaaaataccttaattgg |
| nt | | tatcaacagaagcccggacaggctcctcgccttctgatctaccacaccagccggct |
| | | ccattctggaatccctgccaggttcagcggtagcggatctgggaccgactacaccc |
| | | tcactatcagctcactgcagccagaggacttcgctgtctatttctgtcagcaaggg |
| | | aacaccctgccctacacctttggacagggcaccaagctcgagattaaaggtggagg |
| | | tggcagcggaggaggtgggtccggcggtggaggaagccaggtccaactccaagaaa |
| | | gcggaccgggtcttgtgaagccatcagaaactctttcactgacttgtactgtgagc |
| | | ggagtgtctctccccgattacggggtgtcttggatcagacagccaccggggaaggg |
| | | tctggaatggattggagtgatttggggctctgagactacttactactcttcatccc |
| | | tcaagtcacgcgtcaccatctcaaaggacaactctaagaatcaggtgtcactgaaa |
| | | ctgtcatctgtgaccgcagccgacaccgccgtgtactattgcgctaagcattacta |
| | | ttatggcgggagctacgcaatggattactggggacagggtactctggtcaccgtgt |
| | | ccagccaccaccatcatcaccatcaccat |
| 103101 | 895 | MALPVTALLLPLALLLHAARPeivmtqspatlslspgeratlscrasqdiskylnw |
| CAR 1 | | yqqkpgqaprlliyhtsrlhsgiparfsgsgsgtdytltisslqpedfavyfcqqg |
| Soluble scFv- | | ntlpytfgqgtkleikggggsggggsggggsqvqlqesgpglvkpsetlsltctvs |
| aa | | gvslpdygvswirqppgkglewigviwgsettyyssslksrvtiskdnsknqvslk |
| | | lssvtaadtavyycakhyyyggsyamdywgqgtlvtvsshhhhhhhh |
| 104875 | 896 | atggccctccctgtcaccgccctgctgcttccgctggctcttctgctccacgccgc |
| CAR 1-Full- | | tcggcccgaaattgtgatgacccagtcacccgccactcttagcctttcacccggtg |
| nt | | agcgcgcaaccctgtcttgcagagcctcccaagacatctcaaaataccttaattgg |
| | | tatcaacagaagcccggacaggctcctcgccttctgatctaccacaccagccggct |
| | | ccattctggaatccctgccaggttcagcggtagcggatctgggaccgactacaccc |
| | | tcactatcagctcactgcagccagaggacttcgctgtctatttctgtcagcaaggg |
| | | aacaccctgccctacacctttggacagggcaccaagctcgagattaaaggtggagg |
| | | tggcagcggaggaggtgggtccggcggtggaggaagccaggtccaactccaagaaa |
| | | gcggaccgggtcttgtgaagccatcagaaactctttcactgacttgtactgtgagc |
| | | ggagtgtctctccccgattacggggtgtcttggatcagacagccaccggggaaggg |
| | | tctggaatggattggagtgatttggggctctgagactacttactactcttcatccc |
| | | tcaagtcacgcgtcaccatctcaaaggacaactctaagaatcaggtgtcactgaaa |
| | | ctgtcatctgtgaccgcagccgacaccgccgtgtactattgcgctaagcattacta |
| | | ttatggcgggagctacgcaatggattactggggacagggtactctggtcaccgtgt |
| | | ccagcaccactaccccagcaccgaggccacccaccccggctcctaccatcgcctcc |
| | | cagcctctgtccctgcgtccggaggcatgtagacccgcagctggtggggccgtgca |
| | | tacccggggtcttgacttcgcctgcgatatctacatttgggcccctctggctggta |
| | | cttgcggggtcctgctgctttcactcgtgatcactctttactgtaagcgcggtcgg |
| | | aagaagctgctgtacatctttaagcaacccttcatgaggcctgtgcagactactca |
| | | agaggaggacggctgttcatgccggttcccagaggaggaggaaggcggctgcgaac |
| | | tgcgcgtgaaattcagccgcagcgcagatgctccagcctacaagcaggggcagaac |
| | | cagctctacaacgaactcaatcttggtcggagagaggagtacgacgtgctggacaa |
| | | gcggagaggacgggacccagaaatgggcgggaagccgcgcagaaagaatccccaag |
| | | agggcctgtacaacgagctccaaaaggataagatggcagaagcctatagcgagatt |
| | | ggtatgaaaggggaacgcagaagaggcaaaggccacgacggactgtaccagggact |
| | | cagcaccgccaccaaggacacctatgacgctcttcacatgcaggccctgccgcctc |
| | | gg |
| 104875 | 897 | MALPVTALLLPLALLLHAARPeivmtqspatlslspgeratlscrasqdiskylnw |
| CAR 1-Full- | | yqqkpgqaprlliyhtsrlhsgiparfsgsgsgtdytltisslqpedfavyfcqqg |
| aa | | ntlpytfgqgtkleikggggsggggsggggsqvqlqesgpglvkpsetlsltctvs |
| | | gvslpdygvswirqppgkglewigviwgsettyyssslksrvtiskdnsknqvslk |
| | | lssvtaadtavyycakhyyyggsyamdywgqgtlvtvsstttpaprpptpaptias |
| | | qplslrpeacrpaaggavhtrgldfacdiyiwaplagtcgvlllslvitlyckrgr |
| | | kkllyifkqpfmrpvqttqeedgcscrfpeeeeggcelrvkfsrsadapaykqgqn |
| | | qlynelnlgrreeydvldkrrgrdpemggkprrknpqeglynelqkdkmaeaysei |
| | | gmkgerrrgkghdglyqglstatkdtydalhmqalppr |

CAR 2

| | | |
|---|---|---|
| CAR 2 scFv | 898 | eivmtqspatlslspgeratlscrasqdiskylnwyqqkpgqaprlliyhtsrlhs |
| domain | | giparfsgsgsgtdytltisslqpedfavyfcqqgntlpytfgqgtkleikggggs |
| | | ggggsggggsqvqlqesgpglvkpsetlsltctvsgvslpdygvswirqppgkgle |
| | | wigviwgsettyyqsslksrvtiskdnsknqvslklssvtaadtavyycakhyyyg |
| | | gsyamdywgqgtlvtvss |
| 103102 | 899 | atggccctccctgtcaccgccctgctgcttccgctggctcttctgctccacgccgc |
| CAR 2- | | tcggcccgaaattgtgatgacccagtcacccgccactcttagcctttcacccggtg |
| Soluble scFv- | | agcgcgcaaccctgtcttgcagagcctcccaagacatctcaaaataccttaattgg |
| nt | | tatcaacagaagcccggacaggctcctcgccttctgatctaccacaccagccggct |
| | | ccattctggaatccctgccaggttcagcggtagcggatctgggaccgactacaccc |
| | | tcactatcagctcactgcagccagaggacttcgctgtctatttctgtcagcaaggg |
| | | aacaccctgccctacacctttggacagggcaccaagctcgagattaaaggtggagg |
| | | tggcagcggaggaggtgggtccggcggtggaggaagccaggtccaactccaagaaa |
| | | gcggaccgggtcttgtgaagccatcagaaactctttcactgacttgtactgtgagc |
| | | ggagtgtctctccccgattacggggtgtcttggatcagacagccaccggggaaggg |
| | | tctggaatggattggagtgatttggggctctgagactacttactaccaatcatccc |
| | | tcaagtcacgcgtcaccatctcaaaggacaactctaagaatcaggtgtcactgaaa |
| | | ctgtcatctgtgaccgcagccgacaccgccgtgtactattgcgctaagcattacta |
| | | ttatggcgggagctacgcaatggattactggggacagggtactctggtcaccgtgt |
| | | ccagccaccaccatcatcaccatcaccat |
| 103102 | 900 | MALPVTALLLPLALLLHAARPeivmtqspatlslspgeratlscrasqdiskylnw |
| CAR 2- | | yqqkpgqaprlliyhtsrlhsgiparfsgsgsgtdytltisslqpedfavyfcqqg |
| Soluble scFv- | | ntlpytfgqgtkleikggggsggggsggggsqvqlqesgpglvkpsetlsltctvs |
| aa | | gvslpdygvswirqppgkglewigviwgsettyyqsslksrvtiskdnsknqvslk |
| | | lssvtaadtavyycakhyyyggsyamdywgqgtlvtvsshhhhhhhh |
| 104876 | 901 | atggccctccctgtcaccgccctgctgcttccgctggctcttctgctccacgccgc |
| CAR 2-Full- | | tcggcccgaaattgtgatgacccagtcacccgccactcttagcctttcacccggtg |
| nt | | agcgcgcaaccctgtcttgcagagcctcccaagacatctcaaaataccttaattgg |
| | | tatcaacagaagcccggacaggctcctcgccttctgatctaccacaccagccggct |
| | | ccattctggaatccctgccaggttcagcggtagcggatctgggaccgactacaccc |
| | | tcactatcagctcactgcagccagaggacttcgctgtctatttctgtcagcaaggg |
| | | aacaccctgccctacacctttggacagggcaccaagctcgagattaaaggtggagg |
| | | tggcagcggaggaggtgggtccggcggtggaggaagccaggtccaactccaagaaa |
| | | gcggaccgggtcttgtgaagccatcagaaactctttcactgacttgtactgtgagc |
| | | ggagtgtctctccccgattacggggtgtcttggatcagacagccaccggggaaggg |
| | | tctggaatggattggagtgatttggggctctgagactacttactaccaatcatccc |
| | | tcaagtcacgcgtcaccatctcaaaggacaactctaagaatcaggtgtcactgaaa |
| | | ctgtcatctgtgaccgcagccgacaccgccgtgtactattgcgctaagcattacta |
| | | ttatggcgggagctacgcaatggattactggggacagggtactctggtcaccgtgt |
| | | ccagcaccactaccccagcaccgaggccacccaccccggctcctaccatcgcctcc |
| | | cagcctctgtccctgcgtccggaggcatgtagacccgcagctggtggggccgtgca |
| | | tacccggggtcttgacttcgcctgcgatatctacatttgggcccctctggctggta |
| | | cttgcggggtcctgctgctttcactcgtgatcactctttactgtaagcgcggtcgg |
| | | aagaagctgctgtacatctttaagcaacccttcatgaggcctgtgcagactactca |
| | | agaggaggacggctgttcatgccggttcccagaggaggaggaaggcggctgcgaac |
| | | tgcgcgtgaaattcagccgcagcgcagatgctccagcctacaagcaggggcagaac |
| | | cagctctacaacgaactcaatcttggtcggagagaggagtacgacgtgctggacaa |
| | | gcggagaggacgggacccagaaatgggcgggaagccgcgcagaaagaatccccaag |
| | | agggcctgtacaacgagctccaaaaggataagatggcagaagcctatagcgagatt |
| | | ggtatgaaaggggaacgcagaagaggcaaaggccacgacggactgtaccagggact |
| | | cagcaccgccaccaaggacacctatgacgctcttcacatgcaggccctgccgcctc |
| | | gg |
| 104876 | 902 | MALPVTALLLPLALLLHAARPeivmtqspatlslspgeratlscrasqdiskylnw |
| CAR 2-Full- | | yqqkpgqaprlliyhtsrlhsgiparfsgsgsgtdytltisslqpedfavyfcqqg |
| aa | | ntlpytfgqgtkleikggggsggggsggggsqvqlqesgpglvkpsetlsltctvs |
| | | gvslpdygvswirqppgkglewigviwgsettyyqsslksrvtiskdnsknqvslk |
| | | lssvtaadtavyycakhyyyggsyamdywgqgtlvtvsstttpaprpptpaptias |
| | | qplslrpeacrpaaggavhtrgldfacdiyiwaplagtcgvlllslvitlyckrgr |
| | | kkllyifkqpfmrpvqttqeedgcscrfpeeeeggcelrvkfsrsadapaykqgqn |
| | | qlynelnlgrreeydvldkrrgrdpemggkprrknpqeglynelqkdkmaeaysei |
| | | gmkgerrrgkghdglyqglstatkdtydalhmqalppr |

CAR 3

| | | |
|---|---|---|
| CAR 3 scFv | 903 | qvqlqesgpglvkpsetlsltctvsgvslpdygvswirqppgkglewigviwgset |
| domain | | tyyssslksrvtiskdnsknqvslklssvtaadtavyycakhyyyggsyamdywgq |
| | | gtlvtvssggggsggggsggggseivmtqspatlslspgeratlscrasqdiskyl |
| | | nwyqqkpgqaprlliyhtsrlhsgiparfsgsgsgtdytltisslqpedfavyfcq |
| | | qgntlpytfgqgtkleik |
| 103104 | 904 | atggctctgcccgtgaccgcactcctcctgccactggctctgctgcttcacgccgc |
| CAR 3- | | tcgcccacaagtccagcttcaagaatcagggcctggtctggtgaagccatctgaga |
| Soluble scFv- | | ctctgtccctcacttgcaccgtgagcggagtgtccctcccagactacggagtgagc |
| nt | | tggattagacagcctcccggaaagggactggagtggatcggagtgatttggggtag |
| | | cgaaaccacttactattcatcttccctgaagtcacgggtcaccatttcaaaggata |
| | | actcaaagaatcaagtgagcctcaagctctcatcagtcaccgccgctgacaccgcc |
| | | gtgtattactgtgccaagcattactactatggagggtcctacgccatggactactg |
| | | gggccagggaactctggtcactgtgtcatctggtggaggaggtagcggaggaggcg |
| | | ggagcggtggaggtggctccgaaatcgtgatgacccagagccctgcaaccctgtcc |
| | | ctttctcccggggaacgggctaccctttcttgtcgggcatcacaagatatctcaaa |
| | | atacctcaattggtatcaacagaagccgggacaggcccctaggcttcttatctacc |
| | | acacctctcgcctgcatagcgggattcccgcacgctttagcgggtctggaagcggg |
| | | accgactacactctgaccatctcatctctccagcccgaggacttcgccgtctactt |
| | | ctgccagcagggtaacaccctgccgtacaccttcggccagggcaccaagcttgaga |
| | | tcaaacatcaccaccatcatcaccatcac |
| 103104 | 905 | MALPVTALLLPLALLLHAARPqvqlqesgpglvkpsetlsltctvsgvslpdygvs |
| CAR 3- | | wirqppgkglewigviwgsettyyssslksrvtiskdnsknqvslklssvtaadta |
| Soluble scFv- | | vyycakhyyyggsyamdywgqgtlvtvssggggsggggsggggseivmtqspatls |
| aa | | lspgeratlscrasqdiskylnwyqqkpgqaprlliyhtsrlhsgiparfsgsgsg |
| | | tdytltisslqpedfavyfcqqgntlpytfgqgtkleikhhhhhhhh |
| 104877 | 906 | atggctctgcccgtgaccgcactcctcctgccactggctctgctgcttcacgccgc |
| CAR 3-Full- | | tcgcccacaagtccagcttcaagaatcagggcctggtctggtgaagccatctgaga |
| nt | | ctctgtccctcacttgcaccgtgagcggagtgtccctcccagactacggagtgagc |
| | | tggattagacagcctcccggaaagggactggagtggatcggagtgatttggggtag |
| | | cgaaaccacttactattcatcttccctgaagtcacgggtcaccatttcaaaggata |
| | | actcaaagaatcaagtgagcctcaagctctcatcagtcaccgccgctgacaccgcc |
| | | gtgtattactgtgccaagcattactactatggagggtcctacgccatggactactg |
| | | gggccagggaactctggtcactgtgtcatctggtggaggaggtagcggaggaggcg |
| | | ggagcggtggaggtggctccgaaatcgtgatgacccagagccctgcaaccctgtcc |
| | | ctttctcccggggaacgggctaccctttcttgtcgggcatcacaagatatctcaaa |
| | | atacctcaattggtatcaacagaagccgggacaggcccctaggcttcttatctacc |
| | | acacctctcgcctgcatagcgggattcccgcacgctttagcgggtctggaagcggg |
| | | accgactacactctgaccatctcatctctccagcccgaggacttcgccgtctactt |
| | | ctgccagcagggtaacaccctgccgtacaccttcggccagggcaccaagcttgaga |
| | | tcaaaaccactactcccgctccaaggccacccacccctgccccgaccatcgcctct |
| | | cagccgctttccctgcgtccggaggcatgtagacccgcagctggtggggccgtgca |
| | | tacccggggtcttgacttcgcctgcgatatctacatttgggcccctctggctggta |
| | | cttgcggggtcctgctgctttcactcgtgatcactctttactgtaagcgcggtcgg |
| | | aagaagctgctgtacatctttaagcaacccttcatgaggcctgtgcagactactca |
| | | agaggaggacggctgttcatgccggttcccagaggaggaggaaggcggctgcgaac |
| | | tgcgcgtgaaattcagccgcagcgcagatgctccagcctacaagcaggggcagaac |
| | | cagctctacaacgaactcaatcttggtcggagagaggagtacgacgtgctggacaa |
| | | gcggagaggacgggacccagaaatgggcgggaagccgcgcagaaagaatccccaag |
| | | agggcctgtacaacgagctccaaaaggataagatggcagaagcctatagcgagatt |
| | | ggtatgaaaggggaacgcagaagaggcaaaggccacgacggactgtaccagggact |
| | | cagcaccgccaccaaggacacctatgacgctcttcacatgcaggccctgccgcctc |
| | | gg |
| 104877 | 907 | MALPVTALLLPLALLLHAARPqvqlqesgpglvkpsetlsltctvsgvslpdygvs |
| CAR 3-Full- | | wirqppgkglewigviwgsettyyssslksrvtiskdnsknqvslklssvtaadta |
| aa | | vyycakhyyyggsyamdywgqgtlvtvssggggsggggsggggseivmtqspatls |
| | | lspgeratlscrasqdiskylnwyqqkpgqaprlliyhtsrlhsgiparfsgsgsg |
| | | tdytltisslqpedfavyfcqqgntlpytfgqgtkleiktttpaprpptpaptias |
| | | qplslrpeacrpaaggavhtrgldfacdiyiwaplagtcgvlllslvitlyckrgr |
| | | kkllyifkqpfmrpvqttqeedgcscrfpeeeeggcelrvkfsrsadapaykqgqn |
| | | qlynelnlgrreeydvldkrrgrdpemggkprrknpqeglynelqkdkmaeaysei |
| | | gmkgerrrgkghdglyqglstatkdtydalhmqalppr |

CAR 4

| | | |
|---|---|---|
| CAR 4 scFv | 908 | qvqlqesgpglvkpsetlsltctvsgvslpdygvswirqppgkglewigviwgset |
| domain | | tyyqsslksrvtiskdnsknqvslklssvtaadtavyycakhyyyggsyamdywgq |
| | | gtlvtvssggggsggggsggggseivmtqspatlslspgeratlscrasqdiskyl |
| | | nwyqqkpgqaprlliyhtsrlhsgiparfsgsgsgtdytltisslqpedfavyfcq |
| | | qgntlpytfgqgtkleik |
| 103106 | 909 | atggctctgcccgtgaccgcactcctcctgccactggctctgctgcttcacgccgc |
| CAR 4- | | tcgcccacaagtccagcttcaagaatcagggcctggtctggtgaagccatctgaga |
| Soluble scFv- | | ctctgtccctcacttgcaccgtgagcggagtgtccctcccagactacggagtgagc |
| nt | | tggattagacagcctcccggaaagggactggagtggatcggagtgatttggggtag |
| | | cgaaaccacttactatcaatcttccctgaagtcacgggtcaccatttcaaaggata |
| | | actcaaagaatcaagtgagcctcaagctctcatcagtcaccgccgctgacaccgcc |
| | | gtgtattactgtgccaagcattactactatggagggtcctacgccatggactactg |
| | | gggccagggaactctggtcactgtgtcatctggtggaggaggtagcggaggaggcg |
| | | ggagcggtggaggtggctccgaaatcgtgatgacccagagccctgcaaccctgtcc |
| | | ctttctcccggggaacgggctaccctttcttgtcgggcatcacaagatatctcaaa |
| | | atacctcaattggtatcaacagaagccgggacaggcccctaggcttcttatctacc |
| | | acacctctcgcctgcatagcgggattcccgcacgctttagcgggtctggaagcggg |
| | | accgactacactctgaccatctcatctctccagcccgaggacttcgccgtctactt |
| | | ctgccagcagggtaacaccctgccgtacaccttcggccagggcaccaagcttgaga |
| | | tcaaacatcaccaccatcatcaccatcac |
| 103106 | 910 | MALPVTALLLPLALLLHAARPqvqlqesgpglvkpsetlsltctvsgvslpdygvs |
| CAR 4- | | wirqppgkglewigviwgsettyyqsslksrvtiskdnsknqvslklssvtaadta |
| Soluble scFv- | | vyycakhyyyggsyamdywgqgtlvtvssggggsggggsggggseivmtqspatls |
| aa | | lspgeratlscrasqdiskylnwyqqkpgqaprlliyhtsrlhsgiparfsgsgsg |
| | | tdytltisslqpedfavyfcqqgntlpytfgqgtkleikhhhhhhhh |
| 104878 | 911 | atggctctgcccgtgaccgcactcctcctgccactggctctgctgcttcacgccgc |
| CAR 4-Full- | | tcgcccacaagtccagcttcaagaatcagggcctggtctggtgaagccatctgaga |
| nt | | ctctgtccctcacttgcaccgtgagcggagtgtccctcccagactacggagtgagc |
| | | tggattagacagcctcccggaaagggactggagtggatcggagtgatttggggtag |
| | | cgaaaccacttactatcaatcttccctgaagtcacgggtcaccatttcaaaggata |
| | | actcaaagaatcaagtgagcctcaagctctcatcagtcaccgccgctgacaccgcc |
| | | gtgtattactgtgccaagcattactactatggagggtcctacgccatggactactg |
| | | gggccagggaactctggtcactgtgtcatctggtggaggaggtagcggaggaggcg |
| | | ggagcggtggaggtggctccgaaatcgtgatgacccagagccctgcaaccctgtcc |
| | | ctttctcccggggaacgggctaccctttcttgtcgggcatcacaagatatctcaaa |
| | | atacctcaattggtatcaacagaagccgggacaggcccctaggcttcttatctacc |
| | | acacctctcgcctgcatagcgggattcccgcacgctttagcgggtctggaagcggg |
| | | accgactacactctgaccatctcatctctccagcccgaggacttcgccgtctactt |
| | | ctgccagcagggtaacaccctgccgtacaccttcggccagggcaccaagcttgaga |
| | | tcaaaaccactactcccgctccaaggccacccacccctgccccgaccatcgcctct |
| | | cagccgctttccctgcgtccggaggcatgtagacccgcagctggtggggccgtgca |
| | | tacccggggtcttgacttcgcctgcgatatctacatttgggcccctctggctggta |
| | | cttgcggggtcctgctgctttcactcgtgatcactctttactgtaagcgcggtcgg |
| | | aagaagctgctgtacatctttaagcaacccttcatgaggcctgtgcagactactca |
| | | agaggaggacggctgttcatgccggttcccagaggaggaggaaggcggctgcgaac |
| | | tgcgcgtgaaattcagccgcagcgcagatgctccagcctacaagcaggggcagaac |
| | | cagctctacaacgaactcaatcttggtcggagagaggagtacgacgtgctggacaa |
| | | gcggagaggacgggacccagaaatgggcgggaagccgcgcagaaagaatccccaag |
| | | agggcctgtacaacgagctccaaaaggataagatggcagaagcctatagcgagatt |
| | | ggtatgaaaggggaacgcagaagaggcaaaggccacgacggactgtaccagggact |
| | | cagcaccgccaccaaggacacctatgacgctcttcacatgcaggccctgccgcctc |
| | | gg |
| 104878 | 912 | MALPVTALLLPLALLLHAARPqvqlqesgpglvkpsetlsltctvsgvslpdygvs |
| CAR 4-Full- | | wirqppgkglewigviwgsettyygsslksrvtiskdnsknqvslklssvtaadta |
| aa | | vyycakhyyyggsyamdywgqgtlvtvssggggsggggsggggseivmtqspatls |
| | | lspgeratlscrasqdiskylnwyqqkpgqaprlliyhtsrlhsgiparfsgsgsg |
| | | tdytltisslqpedfavyfcqqgntlpytfgqgtkleiktttpaprpptpaptias |
| | | qplslrpeacrpaaggavhtrgldfacdiyiwaplagtcgvlllslvitlyckrgr |
| | | kkllyifkqpfmrpvqttqeedgcscrfpeeeeggcelrvkfsrsadapaykqgqn |
| | | qlynelnlgrreeydvldkrrgrdpemggkprrknpqeglynelqkdkmaeaysei |
| | | gmkgerrrgkghdglyqglstatkdtydalhmqalppr |

CAR 5

| | | |
|---|---|---|
| CAR 5 scFv | 913 | eivmtqspatlslspgeratlscrasqdiskylnwyqqkpgqaprlliyhtsrlhs |
| domain | | giparfsgsgsgtdytltisslqpedfavyfcqqgntlpytfgqgtkleikggggs |
| | | ggggsggggsggggsqvqlqesgpglvkpsetlsltctvsgvslpdygvswirqpp |
| | | gkglewigviwgsettyyssslksrvtiskdnsknqvslklssvtaadtavyycak |
| | | hyyyggsyamdywgqgtlvtvss |
| 99789 | 914 | atggccctcccagtgaccgctctgctgctgcctctcgcacttcttctccatgccgc |
| CAR 5- | | tcggcctgagatcgtcatgacccaaagccccgctaccctgtccctgtcacccggcg |
| Soluble scFv- | | agagggcaaccctttcatgcagggccagccaggacatttctaagtacctcaactgg |
| nt | | tatcagcagaagccagggcaggctcctcgcctgctgatctaccacaccagccgcct |
| | | ccacagcggtatccccgccagattttccgggagcgggtctggaaccgactacaccc |
| | | tcaccatctcttctctgcagcccgaggatttcgccgtctatttctgccagcagggg |
| | | aatactctgccgtacaccttcggtcaaggtaccaagctggaaatcaagggaggcgg |
| | | aggatcaggcggtggcggaagcggaggaggtggctccggaggaggaggttcccaag |
| | | tgcagcttcaagaatcaggacccggacttgtgaagccatcagaaaccctctccctg |
| | | acttgtaccgtgtccggtgtgagcctccccgactacggagtctcttggattcgcca |
| | | gcctccggggaagggtcttgaatggattggggtgatttggggatcagagactactt |
| | | actactcttcatcacttaagtcacgggtcaccatcagcaaagataatagcaagaac |
| | | caagtgtcacttaagctgtcatctgtgaccgccgctgacaccgccgtgtactattg |
| | | tgccaaacattactattacggagggtcttatgctatggactactggggacagggga |
| | | ccctggtgactgtctctagccatcaccatcaccaccatcatcac |
| 99789 | 915 | MALPVTALLLPLALLLHAARPeivmtqspatlslspgeratlscrasqdiskylnw |
| CAR 5- | | yqqkpgqaprlliyhtsrlhsgiparfsgsgsgtdytltisslqpedfavyfcqqg |
| Soluble scFv- | | ntlpytfgqgtkleikggggsggggsggggsggggsqvqlqesgpglvkpsetlsl |
| aa | | tctvsgvslpdygvswirqppgkglewigviwgsettyyssslksrvtiskdnskn |
| | | qvslklssvtaadtavyycakhyyyggsyamdywgqgtlvtvsshhhhhhhh |
| 104879 | 916 | atggccctccctgtcaccgccctgctgcttccgctggctcttctgctccacgccgc |
| CAR 5-Full- | | tcggcccgaaattgtgatgacccagtcacccgccactcttagcctttcacccggtg |
| nt | | agcgcgcaaccctgtcttgcagagcctcccaagacatctcaaaataccttaattgg |
| | | tatcaacagaagcccggacaggctcctcgccttctgatctaccacaccagccggct |
| | | ccattctggaatccctgccaggttcagcggtagcggatctgggaccgactacaccc |
| | | tcactatcagctcactgcagccagaggacttcgctgtctatttctgtcagcaaggg |
| | | aacaccctgccctacacctttggacagggcaccaagctcgagattaaaggtggagg |
| | | tggcagcggaggaggtgggtccggcggtggaggaagcggcggaggcgggagccagg |
| | | tccaactccaagaaagcggaccgggtcttgtgaagccatcagaaactctttcactg |
| | | acttgtactgtgagcggagtgtctctccccgattacggggtgtcttggatcagaca |
| | | gccaccggggaagggtctggaatggattggagtgatttggggctctgagactactt |
| | | actactcttcatccctcaagtcacgcgtcaccatctcaaaggacaactctaagaat |
| | | caggtgtcactgaaactgtcatctgtgaccgcagccgacaccgccgtgtactattg |
| | | cgctaagcattactattatggcgggagctacgcaatggattactggggacagggta |
| | | ctctggtcaccgtgtccagcaccactaccccagcaccgaggccacccaccccggct |
| | | cctaccatcgcctcccagcctctgtccctgcgtccggaggcatgtagacccgcagc |
| | | tggtggggccgtgcatacccggggtcttgacttcgcctgcgatatctacatttggg |
| | | cccctctggctggtacttgcggggtcctgctgctttcactcgtgatcactctttac |
| | | tgtaagcgcggtcggaagaagctgctgtacatctttaagcaacccttcatgaggcc |
| | | tgtgcagactactcaagaggaggacggctgttcatgccggttcccagaggaggagg |
| | | aaggcggctgcgaactgcgcgtgaaattcagccgcagcgcagatgctccagcctac |
| | | aagcaggggcagaaccagctctacaacgaactcaatcttggtcggagagaggagta |
| | | cgacgtgctggacaagcggagaggacgggacccagaaatgggcgggaagccgcgca |
| | | gaaagaatccccaagagggcctgtacaacgagctccaaaaggataagatggcagaa |
| | | gcctatagcgagattggtatgaaaggggaacgcagaagaggcaaaggccacgacgg |
| | | actgtaccagggactcagcaccgccaccaaggacacctatgacgctcttcacatgc |
| | | aggccctgccgcctcgg |
| 104879 | 917 | MALPVTALLLPLALLLHAARPeivmtqspatlslspgeratlscrasqdiskylnw |
| CAR 5-Full- | | yqqkpgqaprlliyhtsrlhsgiparfsgsgsgtdytltisslqpedfavyfcqqg |
| aa | | ntlpytfgqgtkleikggggsggggsggggsggggsqvqlqesgpglvkpsetlsl |
| | | tctvsgvslpdygvswirqppgkglewigviwgsettyyssslksrvtiskdnskn |
| | | qvslklssvtaadtavyycakhyyyggsyamdywgqgtlvtvsstttpaprpptpa |
| | | ptiasqplslrpeacrpaaggavhtrgldfacdiyiwaplagtcgvlllslvitly |
| | | ckrgrkkllyifkqpfmrpvqttgeedgcscrfpeeeeggcelrvkfsrsadapay |
| | | kqgqnqlynelnlgrreeydvldkrrgrdpemggkprrknpqeglynelqkdkmae |
| | | ayseigmkgerrrgkghdglygglstatkdtydalhmqalppr |

CAR 6

| | | |
|---|---|---|
| CAR 6 | 918 | eivmtqspatlslspgeratlscrasqdiskylnwyqqkpgqaprlliyhtsrlhs |
| scFv domain | | giparfsgsgsgtdytltisslqpedfavyfcqqgntlpytfgqgtkleikggggs |
| | | ggggsggggsggggsqvqlqesgpglvkpsetlsltctvsgvslpdygvswirqpp |
| | | gkglewigviwgsettyyqsslksrvtiskdnsknqvslklssvtaadtavyycak |
| | | hyyyggsyamdywgqgtlvtvss |
| 99790 | 919 | atggccctcccagtgaccgctctgctgctgcctctcgcacttcttctccatgccgc |
| CAR 6- | | tcggcctgagatcgtcatgacccaaagccccgctaccctgtccctgtcacccggcg |
| Soluble scFv- | | agagggcaaccctttcatgcagggccagccaggacatttctaagtacctcaactgg |
| nt | | tatcagcagaagccagggcaggctcctcgcctgctgatctaccacaccagccgcct |
| | | ccacagcggtatccccgccagattttccgggagcgggtctggaaccgactacaccc |
| | | tcaccatctcttctctgcagcccgaggatttcgccgtctatttctgccagcagggg |
| | | aatactctgccgtacaccttcggtcaaggtaccaagctggaaatcaagggaggcgg |
| | | aggatcaggcggtggcggaagcggaggaggtggctccggaggaggaggttcccaag |
| | | tgcagcttcaagaatcaggacccggacttgtgaagccatcagaaaccctctccctg |
| | | acttgtaccgtgtccggtgtgagcctccccgactacggagtctcttggattcgcca |
| | | gcctccggggaagggtcttgaatggattggggtgatttggggatcagagactactt |
| | | actaccagtcatcacttaagtcacgggtcaccatcagcaaagataatagcaagaac |
| | | caagtgtcacttaagctgtcatctgtgaccgccgctgacaccgccgtgtactattg |
| | | tgccaaacattactattacggagggtcttatgctatggactactggggacagggga |
| | | ccctggtgactgtctctagccatcaccatcaccaccatcatcac |
| 99790 | 920 | MALPVTALLLPLALLLHAARPeivmtqspatlslspgeratlscrasqdiskylnw |
| CAR 6- | | yqqkpgqaprlliyhtsrlhsgiparfsgsgsgtdytltisslqpedfavyfcqqg |
| Soluble scFv- | | ntlpytfgqgtkleikggggsggggsggggsggggsqvqlqesgpglvkpsetlsl |
| aa | | tctvsgvslpdygvswirqppgkglewigviwgsettyyqsslksrvtiskdnskn |
| | | qvslklssvtaadtavyycakhyyyggsyamdywgqgtlvtvsshhhhhhhh |
| 104880 | 921 | atggccctccctgtcaccgccctgctgcttccgctggctcttctgctccacgccgc |
| CAR 6- | | tcggcccgaaattgtgatgacccagtcacccgccactcttagcctttcacccggtg |
| Full-nt | | agcgcgcaaccctgtcttgcagagcctcccaagacatctcaaaataccttaattgg |
| | | tatcaacagaagcccggacaggctcctcgccttctgatctaccacaccagccggct |
| | | ccattctggaatccctgccaggttcagcggtagcggatctgggaccgactacaccc |
| | | tcactatcagctcactgcagccagaggacttcgctgtctatttctgtcagcaaggg |
| | | aacaccctgccctacacctttggacagggcaccaagctcgagattaaaggtggagg |
| | | tggcagcggaggaggtgggtccggcggtggaggaagcggaggcggagggagccagg |
| | | tccaactccaagaaagcggaccgggtcttgtgaagccatcagaaactctttcactg |
| | | acttgtactgtgagcggagtgtctctccccgattacggggtgtcttggatcagaca |
| | | gccaccggggaagggtctggaatggattggagtgatttggggctctgagactactt |
| | | actaccaatcatccctcaagtcacgcgtcaccatctcaaaggacaactctaagaat |
| | | caggtgtcactgaaactgtcatctgtgaccgcagccgacaccgccgtgtactattg |
| | | cgctaagcattactattatggcgggagctacgcaatggattactggggacagggta |
| | | ctctggtcaccgtgtccagcaccactaccccagcaccgaggccacccaccccggct |
| | | cctaccatcgcctcccagcctctgtccctgcgtccggaggcatgtagacccgcagc |
| | | tggtggggccgtgcatacccggggtcttgacttcgcctgcgatatctacatttggg |
| | | cccctctggctggtacttgcggggtcctgctgctttcactcgtgatcactctttac |
| | | tgtaagcgcggtcggaagaagctgctgtacatctttaagcaacccttcatgaggcc |
| | | tgtgcagactactcaagaggaggacggctgttcatgccggttcccagaggaggagg |
| | | aaggcggctgcgaactgcgcgtgaaattcagccgcagcgcagatgctccagcctac |
| | | aagcaggggcagaaccagctctacaacgaactcaatcttggtcggagagaggagta |
| | | cgacgtgctggacaagcggagaggacgggacccagaaatgggcgggaagccgcgca |
| | | gaaagaatccccaagagggcctgtacaacgagctccaaaaggataagatggcagaa |
| | | gcctatagcgagattggtatgaaaggggaacgcagaagaggcaaaggccacgacgg |
| | | actgtaccagggactcagcaccgccaccaaggacacctatgacgctcttcacatgc |
| | | aggccctgccgcctcgg |
| 104880 | 922 | MALPVTALLLPLALLLHAARPeivmtqspatlslspgeratlscrasqdiskylnw |
| CAR 6- | | yqqkpgqaprlliyhtsrlhsgiparfsgsgsgtdytltisslqpedfavyfcqqg |
| Full-aa | | ntlpytfgqgtkleikggggsggggsggggsggggsqvqlqesgpglvkpsetlsl |
| | | tctvsgvslpdygvswirqppgkglewigviwgsettyyqsslksrvtiskdnskn |
| | | qvslklssvtaadtavyycakhyyyggsyamdywgqgtlvtvsstttpaprpptpa |
| | | ptiasqplslrpeacrpaaggavhtrgldfacdiyiwaplagtcgvlllslvitly |
| | | ckrgrkkllyifkqpfmrpvqttgeedgcscrfpeeeeggcelrvkfsrsadapay |
| | | kqgqnqlynelnlgrreeydvldkrrgrdpemggkprrknpqeglynelqkdkmae |
| | | ayseigmkgerrrgkghdglyqglstatkdtydalhmqalppr |

CAR 7

| | | |
|---|---|---|
| CAR 7 scFv | 923 | qvqlqesgpglvkpsetlsltctvsgvslpdygvswirqppgkglewigviwgset |
| domain | | tyyssslksrvtiskdnsknqvslklssvtaadtavyycakhyyyggsyamdywgq |
| | | gtlvtvssggggsggggsggggsggggseivmtqspatlslspgeratlscrasqd |
| | | iskylnwyqqkpgqaprlliyhtsrlhsgiparfsgsgsgtdytltisslqpedfa |
| | | vyfcqqgntlpytfgqgtkleik |
| 100796 | 924 | atggcactgcctgtcactgccctcctgctgcctctggccctccttctgcatgccgc |
| CAR 7- | | caggccccaagtccagctgcaagagtcaggacccggactggtgaagccgtctgaga |
| Soluble scFv- | | ctctctcactgacttgtaccgtcagcggcgtgtccctccccgactacggagtgtca |
| nt | | tggatccgccaacctcccgggaaagggcttgaatggattggtgtcatctggggttc |
| | | tgaaaccacctactactcatcttccctgaagtccagggtgaccatcagcaaggata |
| | | attccaagaaccaggtcagccttaagctgtcatctgtgaccgctgctgacaccgcc |
| | | gtgtattactgcgccaagcactactattacggaggaagctacgctatggactattg |
| | | gggacagggcactctcgtgactgtgagcagcggcggtggagggtctggaggtggag |
| | | gatccggtggtggtgggtcaggcggaggagggagcgagattgtgatgactcagtca |
| | | ccagccaccctttctctttcacccggcgagagagcaaccctgagctgtagagccag |
| | | ccaggacatttctaagtacctcaactggtatcagcaaaaaccggggcaggcccctc |
| | | gcctcctgatctaccatacctcacgccttcactctggtatccccgctcggtttagc |
| | | ggatcaggatctggtaccgactacactctgaccatttccagcctgcagccagaaga |
| | | tttcgcagtgtatttctgccagcagggcaatacccttccttacaccttcggtcagg |
| | | gaaccaagctcgaaatcaagcaccatcaccatcatcaccaccat |
| 100796 | 925 | MALPVTALLLPLALLLHAARPqvqlqesgpglvkpsetlsltctvsgvslpdygvs |
| CAR 7- | | wirqppgkglewigviwgsettyyssslksrvtiskdnsknqvslklssvtaadta |
| Soluble scFv- | | vyycakhyyyggsyamdywgqgtlvtvssggggsggggsggggsggggseivmtqs |
| aa | | patlslspgeratlscrasqdiskylnwyqqkpgqaprlliyhtsrlhsgiparfs |
| | | gsgsgtdytltisslqpedfavyfcqqgntlpytfgqgtkleikhhhhhhhh |
| 104881 | 926 | atggctctgcccgtgaccgcactcctcctgccactggctctgctgcttcacgccgc |
| CAR 7 | | tcgcccacaagtccagcttcaagaatcagggcctggtctggtgaagccatctgaga |
| Full-nt | | ctctgtccctcacttgcaccgtgagcggagtgtccctcccagactacggagtgagc |
| | | tggattagacagcctcccggaaagggactggagtggatcggagtgatttggggtag |
| | | cgaaaccacttactattcatcttccctgaagtcacgggtcaccatttcaaaggata |
| | | actcaaagaatcaagtgagcctcaagctctcatcagtcaccgccgctgacaccgcc |
| | | gtgtattactgtgccaagcattactactatggagggtcctacgccatggactactg |
| | | gggccagggaactctggtcactgtgtcatctggtggaggaggtagcggaggaggcg |
| | | ggagcggtggaggtggctccggaggtggcggaagcgaaatcgtgatgacccagagc |
| | | cctgcaaccctgtccctttctcccggggaacgggctaccctttcttgtcgggcatc |
| | | acaagatatctcaaaatacctcaattggtatcaacagaagccgggacaggccccta |
| | | ggcttcttatctaccacacctctcgcctgcatagcgggattcccgcacgctttagc |
| | | gggtctggaagcgggaccgactacactctgaccatctcatctctccagcccgagga |
| | | cttcgccgtctacttctgccagcagggtaacaccctgccgtacaccttcggccagg |
| | | gcaccaagcttgagatcaaaaccactactcccgctccaaggccacccacccctgcc |
| | | ccgaccatcgcctctcagccgctttccctgcgtccggaggcatgtagacccgcagc |
| | | tggtggggccgtgcatacccggggtcttgacttcgcctgcgatatctacatttggg |
| | | cccctctggctggtacttgcggggtcctgctgctttcactcgtgatcactctttac |
| | | tgtaagcgcggtcggaagaagctgctgtacatctttaagcaacccttcatgaggcc |
| | | tgtgcagactactcaagaggaggacggctgttcatgccggttcccagaggaggagg |
| | | aaggcggctgcgaactgcgcgtgaaattcagccgcagcgcagatgctccagcctac |
| | | aagcaggggcagaaccagctctacaacgaactcaatcttggtcggagagaggagta |
| | | cgacgtgctggacaagcggagaggacgggacccagaaatgggcgggaagccgcgca |
| | | gaaagaatccccaagagggcctgtacaacgagctccaaaaggataagatggcagaa |
| | | gcctatagcgagattggtatgaaaggggaacgcagaagaggcaaaggccacgacgg |
| | | actgtaccagggactcagcaccgccaccaaggacacctatgacgctcttcacatgc |
| | | aggccctgccgcctcgg |
| 104881 | 927 | MALPVTALLLPLALLLHAARPqvqlqesgpglvkpsetlsltctvsgvslpdygvs |
| CAR 7 | | wirqppgkglewigviwgsettyyssslksrvtiskdnsknqvslklssvtaadta |
| Full-aa | | vyycakhyyyggsyamdywgqgtlvtvssggggsggggsggggsggggseivmtqs |
| | | patlslspgeratlscrasqdiskylnwyqqkpgqaprlliyhtsrlhsgiparfs |
| | | gsgsgtdytltisslqpedfavyfcqqgntlpytfgqgtkleiktttpaprpptpa |
| | | ptiasqplslrpeacrpaaggavhtrgldfacdiyiwaplagtcgvlllslvitly |
| | | ckrgrkkllyifkqpfmrpvqttgeedgcscrfpeeeeggcelrvkfsrsadapay |
| | | kqgqnqlynelnlgrreeydvldkrrgrdpemggkprrknpqeglynelqkdkmae |
| | | ayseigmkgerrrgkghdglyqglstatkdtydalhmqalppr |

CAR 8

| | | |
|---|---|---|
| CAR 8 scFv | 928 | qvqlqesgpglvkpsetlsltctvsgvslpdygvswirqppgkglewigviwgset |
| domain | | tyyqsslksrvtiskdnsknqvslklssvtaadtavyycakhyyyggsyamdywgq |
| | | gtlvtvssggggsggggsggggsggggseivmtqspatlslspgeratlscrasqd |
| | | iskylnwyqqkpgqaprlliyhtsrlhsgiparfsgsgsgtdytltisslqpedfa |
| | | vyfcqqgntlpytfgqgtkleik |
| 100798 | 929 | atggcactgcctgtcactgccctcctgctgcctctggccctccttctgcatgccgc |
| CAR 8- | | caggccccaagtccagctgcaagagtcaggacccggactggtgaagccgtctgaga |
| Soluble scFv- | | ctctctcactgacttgtaccgtcagcggcgtgtccctccccgactacggagtgtca |
| nt | | tggatccgccaacctcccgggaaagggcttgaatggattggtgtcatctggggttc |
| | | tgaaaccacctactaccagtcttccctgaagtccagggtgaccatcagcaaggata |
| | | attccaagaaccaggtcagccttaagctgtcatctgtgaccgctgctgacaccgcc |
| | | gtgtattactgcgccaagcactactattacggaggaagctacgctatggactattg |
| | | gggacagggcactctcgtgactgtgagcagcggcggtggagggtctggaggtggag |
| | | gatccggtggtggtgggtcaggcggaggagggagcgagattgtgatgactcagtca |
| | | ccagccaccctttctctttcacccggcgagagagcaaccctgagctgtagagccag |
| | | ccaggacatttctaagtacctcaactggtatcagcaaaaaccggggcaggcccctc |
| | | gcctcctgatctaccatacctcacgccttcactctggtatccccgctcggtttagc |
| | | ggatcaggatctggtaccgactacactctgaccatttccagcctgcagccagaaga |
| | | tttcgcagtgtatttctgccagcagggcaatacccttccttacaccttcggtcagg |
| | | gaaccaagctcgaaatcaagcaccatcaccatcatcatcaccac |
| 100798 | 930 | MALPVTALLLPLALLLHAARPqvqlqesgpglvkpsetlsltctvsgvslpdygvs |
| CAR 8- | | wirqppgkglewigviwgsettyyqsslksrvtiskdnsknqvslklssvtaadta |
| Soluble scFv- | | vyycakhyyyggsyamdywgqgtlvtvssggggsggggsggggsggggseivmtqs |
| aa | | patlslspgeratlscrasqdiskylnwyqqkpgqaprlliyhtsrlhsgiparfs |
| | | gsgsgtdytltisslqpedfavyfcqqgntlpytfgqgtkleikhhhhhhhh |
| 104882 CAR | 931 | atggctctgcccgtgaccgcactcctcctgccactggctctgctgcttcacgccgc |
| 8-Full-nt | | tcgcccacaagtccagcttcaagaatcagggcctggtctggtgaagccatctgaga |
| | | ctctgtccctcacttgcaccgtgagcggagtgtccctcccagactacggagtgagc |
| | | tggattagacagcctcccggaaagggactggagtggatcggagtgatttggggtag |
| | | cgaaaccacttactatcaatcttccctgaagtcacgggtcaccatttcaaaggata |
| | | actcaaagaatcaagtgagcctcaagctctcatcagtcaccgccgctgacaccgcc |
| | | gtgtattactgtgccaagcattactactatggagggtcctacgccatggactactg |
| | | gggccagggaactctggtcactgtgtcatctggtggaggaggtagcggaggaggcg |
| | | ggagcggtggaggtggctccggaggcggtgggtcagaaatcgtgatgacccagagc |
| | | cctgcaaccctgtccctttctcccggggaacgggctaccctttcttgtcgggcatc |
| | | acaagatatctcaaaatacctcaattggtatcaacagaagccgggacaggccccta |
| | | ggcttcttatctaccacacctctcgcctgcatagcgggattcccgcacgctttagc |
| | | gggtctggaagcgggaccgactacactctgaccatctcatctctccagcccgagga |
| | | cttcgccgtctacttctgccagcagggtaacaccctgccgtacaccttcggccagg |
| | | gcaccaagcttgagatcaaaaccactactcccgctccaaggccacccacccctgcc |
| | | ccgaccatcgcctctcagccgctttccctgcgtccggaggcatgtagacccgcagc |
| | | tggtggggccgtgcatacccggggtcttgacttcgcctgcgatatctacatttggg |
| | | cccctctggctggtacttgcggggtcctgctgctttcactcgtgatcactctttac |
| | | tgtaagcgcggtcggaagaagctgctgtacatctttaagcaacccttcatgaggcc |
| | | tgtgcagactactcaagaggaggacggctgttcatgccggttcccagaggaggagg |
| | | aaggcggctgcgaactgcgcgtgaaattcagccgcagcgcagatgctccagcctac |
| | | aagcaggggcagaaccagctctacaacgaactcaatcttggtcggagagaggagta |
| | | cgacgtgctggacaagcggagaggacgggacccagaaatgggcgggaagccgcgca |
| | | gaaagaatccccaagagggcctgtacaacgagctccaaaaggataagatggcagaa |
| | | gcctatagcgagattggtatgaaaggggaacgcagaagaggcaaaggccacgacgg |
| | | actgtaccagggactcagcaccgccaccaaggacacctatgacgctcttcacatgc |
| | | aggccctgccgcctcgg |
| 104882 | 932 | MALPVTALLLPLALLLHAARPqvqlqesgpglvkpsetlsltctvsgvslpdygvs |
| CAR 8-Full- | | wirqppgkglewigviwgsettyyqsslksrvtiskdnsknqvslklssvtaadta |
| aa | | vyycakhyyyggsyamdywgqgtlvtvssggggsggggsggggsggggseivmtqs |
| | | patlslspgeratlscrasqdiskylnwyqqkpgqaprlliyhtsrlhsgiparfs |
| | | gsgsgtdytltisslqpedfavyfcqqgntlpytfgqgtkleiktttpaprpptpa |
| | | ptiasqplslrpeacrpaaggavhtrgldfacdiyiwaplagtcgvlllslvitly |
| | | ckrgrkkllyifkqpfmrpvqttgeedgcscrfpeeeeggcelrvkfsrsadapay |
| | | kqgqnqlynelnlgrreeydvldkrrgrdpemggkprrknpqeglynelqkdkmae |
| | | ayseigmkgerrrgkghdglyqglstatkdtydalhmqalppr |

CAR 9

| | | |
|---|---|---|
| CAR 9 scFv | 933 | eivmtqspatlslspgeratlscrasqdiskylnwyqqkpgqaprlliyhtsrlhs |
| domain | | giparfsgsgsgtdytltisslqpedfavyfcqqgntlpytfgqgtkleikggggs |
| | | ggggsggggsggggsqvqlqesgpglvkpsetlsltctvsgvslpdygvswirqpp |
| | | gkglewigviwgsettyynsslksrvtiskdnsknqvslklssvtaadtavyycak |
| | | hyyyggsyamdywgqgtlvtvss |
| 99789 | 934 | atggccctcccagtgaccgctctgctgctgcctctcgcacttcttctccatgccgc |
| CAR 9- | | tcggcctgagatcgtcatgacccaaagccccgctaccctgtccctgtcacccggcg |
| Soluble scFv- | | agagggcaaccctttcatgcagggccagccaggacatttctaagtacctcaactgg |
| nt | | tatcagcagaagccagggcaggctcctcgcctgctgatctaccacaccagccgcct |
| | | ccacagcggtatccccgccagattttccgggagcgggtctggaaccgactacaccc |
| | | tcaccatctcttctctgcagcccgaggatttcgccgtctatttctgccagcagggg |
| | | aatactctgccgtacaccttcggtcaaggtaccaagctggaaatcaagggaggcgg |
| | | aggatcaggcggtggcggaagcggaggaggtggctccggaggaggaggttcccaag |
| | | tgcagcttcaagaatcaggacccggacttgtgaagccatcagaaaccctctccctg |
| | | acttgtaccgtgtccggtgtgagcctccccgactacggagtctcttggattcgcca |
| | | gcctccggggaagggtcttgaatggattggggtgatttggggatcagagactactt |
| | | actacaattcatcacttaagtcacgggtcaccatcagcaaagataatagcaagaac |
| | | caagtgtcacttaagctgtcatctgtgaccgccgctgacaccgccgtgtactattg |
| | | tgccaaacattactattacggagggtcttatgctatggactactggggacagggga |
| | | ccctggtgactgtctctagccatcaccatcaccaccatcatcac |
| 99789 | 935 | MALPVTALLLPLALLLHAARPeivmtqspatlslspgeratlscrasqdiskylnw |
| CAR 9- | | yqqkpgqaprlliyhtsrlhsgiparfsgsgsgtdytltisslqpedfavyfcqqg |
| Soluble scFv- | | ntlpytfgqgtkleikggggsggggsggggsggggsqvqlqesgpglvkpsetlsl |
| aa | | tctvsgvslpdygvswirqppgkglewigviwgsettyynsslksrvtiskdnskn |
| | | qvslklssvtaadtavyycakhyyyggsyamdywgqgtlvtvsshhhhhhhh |
| 105974 | 936 | atggccctccctgtcaccgccctgctgcttccgctggctcttctgctccacgccgc |
| CAR 9-Full- | | tcggcccgaaattgtgatgacccagtcacccgccactcttagcctttcacccggtg |
| nt | | agcgcgcaaccctgtcttgcagagcctcccaagacatctcaaaataccttaattgg |
| | | tatcaacagaagcccggacaggctcctcgccttctgatctaccacaccagccggct |
| | | ccattctggaatccctgccaggttcagcggtagcggatctgggaccgactacaccc |
| | | tcactatcagctcactgcagccagaggacttcgctgtctatttctgtcagcaaggg |
| | | aacaccctgccctacacctttggacagggcaccaagctcgagattaaaggtggagg |
| | | tggcagcggaggaggtgggtccggcggtggaggaagcggaggcggtgggagccagg |
| | | tccaactccaagaaagcggaccgggtcttgtgaagccatcagaaactctttcactg |
| | | acttgtactgtgagcggagtgtctctccccgattacggggtgtcttggatcagaca |
| | | gccaccggggaagggtctggaatggattggagtgatttggggctctgagactactt |
| | | actacaactcatccctcaagtcacgcgtcaccatctcaaaggacaactctaagaat |
| | | caggtgtcactgaaactgtcatctgtgaccgcagccgacaccgccgtgtactattg |
| | | cgctaagcattactattatggcgggagctacgcaatggattactggggacagggta |
| | | ctctggtcaccgtgtccagcaccactaccccagcaccgaggccacccaccccggct |
| | | cctaccatcgcctcccagcctctgtccctgcgtccggaggcatgtagacccgcagc |
| | | tggtggggccgtgcatacccggggtcttgacttcgcctgcgatatctacatttggg |
| | | cccctctggctggtacttgcggggtcctgctgctttcactcgtgatcactctttac |
| | | tgtaagcgcggtcggaagaagctgctgtacatctttaagcaacccttcatgaggcc |
| | | tgtgcagactactcaagaggaggacggctgttcatgccggttcccagaggaggagg |
| | | aaggcggctgcgaactgcgcgtgaaattcagccgcagcgcagatgctccagcctac |
| | | aagcaggggcagaaccagctctacaacgaactcaatcttggtcggagagaggagta |
| | | cgacgtgctggacaagcggagaggacgggacccagaaatgggcgggaagccgcgca |
| | | gaaagaatccccaagagggcctgtacaacgagctccaaaaggataagatggcagaa |
| | | gcctatagcgagattggtatgaaaggggaacgcagaagaggcaaaggccacgacgg |
| | | actgtaccagggactcagcaccgccaccaaggacacctatgacgctcttcacatgc |
| | | aggccctgccgcctcgg |
| 105974 | 937 | MALPVTALLLPLALLLHAARPeivmtqspatlslspgeratlscrasqdiskylnw |
| CAR 9-Full- | | yqqkpgqaprlliyhtsrlhsgiparfsgsgsgtdytltisslqpedfavyfcqqg |
| aa | | ntlpytfgqgtkleikggggsggggsggggsggggsqvqlqesgpglvkpsetlsl |
| | | tctvsgvslpdygvswirqppgkglewigviwgsettyynsslksrvtiskdnskn |
| | | qvslklssvtaadtavyycakhyyyggsyamdywgqgtlvtvsstttpaprpptpa |
| | | ptiasqplslrpeacrpaaggavhtrgldfacdiyiwaplagtcgvlllslvitly |
| | | ckrgrkkllyifkqpfmrpvqttgeedgcscrfpeeeeggcelrvkfsrsadapay |
| | | kqgqnqlynelnlgrreeydvldkrrgrdpemggkprrknpqeglynelqkdkmae |
| | | ayseigmkgerrrgkghdglyqglstatkdtydalhmqalppr |

CAR 10

| | | |
|---|---|---|
| CAR 10 scFv | 938 | qvqlqesgpglvkpsetlsltctvsgvslpdygvswirqppgkglewigviwgset |
| domain | | tyynsslksrvtiskdnsknqvslklssvtaadtavyycakhyyyggsyamdywgq |
| | | gtlvtvssggggsggggsggggsggggseivmtqspatlslspgeratlscrasqd |
| | | iskylnwyqqkpgqaprlliyhtsrlhsgiparfsgsgsgtdytltisslqpedfa |
| | | vyfcqqgntlpytfgqgtkleik |
| 100796 | 939 | atggcactgcctgtcactgccctcctgctgcctctggccctccttctgcatgccgc |
| CAR 10- | | caggccccaagtccagctgcaagagtcaggacccggactggtgaagccgtctgaga |
| Soluble scFv- | | ctctctcactgacttgtaccgtcagcggcgtgtccctccccgactacggagtgtca |
| nt | | tggatccgccaacctcccgggaaagggcttgaatggattggtgtcatctggggttc |
| | | tgaaaccacctactacaactcttccctgaagtccagggtgaccatcagcaaggata |
| | | attccaagaaccaggtcagccttaagctgtcatctgtgaccgctgctgacaccgcc |
| | | gtgtattactgcgccaagcactactattacggaggaagctacgctatggactattg |
| | | gggacagggcactctcgtgactgtgagcagcggcggtggagggtctggaggtggag |
| | | gatccggtggtggtgggtcaggcggaggagggagcgagattgtgatgactcagtca |
| | | ccagccaccctttctctttcacccggcgagagagcaaccctgagctgtagagccag |
| | | ccaggacatttctaagtacctcaactggtatcagcaaaaaccggggcaggcccctc |
| | | gcctcctgatctaccatacctcacgccttcactctggtatccccgctcggtttagc |
| | | ggatcaggatctggtaccgactacactctgaccatttccagcctgcagccagaaga |
| | | tttcgcagtgtatttctgccagcagggcaatacccttccttacaccttcggtcagg |
| | | gaaccaagctcgaaatcaagcaccatcaccatcatcaccaccat |
| 100796 | 940 | MALPVTALLLPLALLLHAARPqvqlqesgpglvkpsetlsltctvsgvslpdygvs |
| CAR 10- | | wirqppgkglewigviwgsettyynsslksrvtiskdnsknqvslklssvtaadta |
| Soluble scFv- | | vyycakhyyyggsyamdywgqgtlvtvssggggsggggsggggsggggseivmtqs |
| aa | | patlslspgeratlscrasqdiskylnwyqqkpgqaprlliyhtsrlhsgiparfs |
| | | gsgsgtdytltisslqpedfavyfcqqgntlpytfgqgtkleikhhhhhhhh |
| 105975 CAR | 941 | atggccctccctgtcaccgccctgctgcttccgctggctcttctgctccacgccgc |
| 10 Full-nt | | tcggcccgaaattgtgatgacccagtcacccgccactcttagcctttcacccggtg |
| | | agcgcgcaaccctgtcttgcagagcctcccaagacatctcaaaataccttaattgg |
| | | tatcaacagaagcccggacaggctcctcgccttctgatctaccacaccagccggct |
| | | ccattctggaatccctgccaggttcagcggtagcggatctgggaccgactacaccc |
| | | tcactatcagctcactgcagccagaggacttcgctgtctatttctgtcagcaaggg |
| | | aacaccctgccctacacctttggacagggcaccaagctcgagattaaaggtggagg |
| | | tggcagcggaggaggtgggtccggcggtggaggaagcggaggcggtgggagccagg |
| | | tccaactccaagaaagcggaccgggtcttgtgaagccatcagaaactctttcactg |
| | | acttgtactgtgagcggagtgtctctccccgattacggggtgtcttggatcagaca |
| | | gccaccggggaagggtctggaatggattggagtgatttggggctctgagactactt |
| | | actacaactcatccctcaagtcacgcgtcaccatctcaaaggacaactctaagaat |
| | | caggtgtcactgaaactgtcatctgtgaccgcagccgacaccgccgtgtactattg |
| | | cgctaagcattactattatggcgggagctacgcaatggattactggggacagggta |
| | | ctctggtcaccgtgtccagcaccactaccccagcaccgaggccacccaccccggct |
| | | cctaccatcgcctcccagcctctgtccctgcgtccggaggcatgtagacccgcagc |
| | | tggtggggccgtgcatacccggggtcttgacttcgcctgcgatatctacatttggg |
| | | cccctctggctggtacttgcggggtcctgctgctttcactcgtgatcactctttac |
| | | tgtaagcgcggtcggaagaagctgctgtacatctttaagcaacccttcatgaggcc |
| | | tgtgcagactactcaagaggaggacggctgttcatgccggttcccagaggaggagg |
| | | aaggcggctgcgaactgcgcgtgaaattcagccgcagcgcagatgctccagcctac |
| | | aagcaggggcagaaccagctctacaacgaactcaatcttggtcggagagaggagta |
| | | cgacgtgctggacaagcggagaggacgggacccagaaatgggcgggaagccgcgca |
| | | gaaagaatccccaagagggcctgtacaacgagctccaaaaggataagatggcagaa |
| | | gcctatagcgagattggtatgaaaggggaacgcagaagaggcaaaggccacgacgg |
| | | actgtaccagggactcagcaccgccaccaaggacacctatgacgctcttcacatgc |
| | | aggccctgccgcctcgg |
| 105975 | 942 | MALPVTALLLPLALLLHAARPEIVMTQSPATLSLSPGERATLSCRASQDISKYLNW |
| CAR 10 Full- | | YQQKPGQAPRLLIYHTSRLHSGIPARFSGSGSGTDYTLTISSLQPEDFAVYFCQQG |
| aa | | NTLPYTFGQGTKLEIKGGGGSGGGGSGGGGSGGGGSQVQLQESGPGLVKPSETLSL |
| | | TCTVSGVSLPDYGVSWIRQPPGKGLEWIGVIWGSETTYYNSSLKSRVTISKDNSKN |
| | | QVSLKLSSVTAADTAVYYCAKHYYYGGSYAMDYWGQGTLVTVSSTTTPAPRPPTPA |
| | | PTIASQPLSLRPEACRPAAGGAVHTRGLDFACDIYIWAPLAGTCGVLLLSLVITLY |
| | | CKRGRKKLLYIFKQPFMRPVQTTQEEDGCSCRFPEEEEGGCELRVKFSRSADAPAY |
| | | KQGQNQLYNELNLGRREEYDVLDKRRGRDPEMGGKPRRKNPQEGLYNELQKDKMAE |
| | | AYSEIGMKGERRRGKGHDGLYQGLSTATKDTYDALHMQALPPR |

CAR 11

| | | |
|---|---|---|
| CAR 11 scFv | 943 | eivmtqspatlslspgeratlscrasqdiskylnwyqqkpgqaprlliyhtsrlhs |
| domain | | giparfsgsgsgtdytltisslqpedfavyfcqqgntlpytfgqgtkleikggggs |
| | | ggggsggggsqvqlqesgpglvkpsetlsltctvsgvslpdygvswirqppgkgle |
| | | wigviwgsettyynsslksrvtiskdnsknqvslklssvtaadtavyycakhyyyg |
| | | gsyamdywgqgtlvtvss |
| 103101 | 944 | Atggccctccctgtcaccgccctgctgcttccgctggctcttctgctccacgccgc |
| CAR 11- | | tcggcccgaaattgtgatgacccagtcacccgccactcttagcctttcacccggtg |
| Soluble scFv- | | agcgcgcaaccctgtcttgcagagcctcccaagacatctcaaaataccttaattgg |
| nt | | tatcaacagaagcccggacaggctcctcgccttctgatctaccacaccagccggct |
| | | ccattctggaatccctgccaggttcagcggtagcggatctgggaccgactacaccc |
| | | tcactatcagctcactgcagccagaggacttcgctgtctatttctgtcagcaaggg |
| | | aacaccctgccctacacctttggacagggcaccaagctcgagattaaaggtggagg |
| | | tggcagcggaggaggtgggtccggcggtggaggaagccaggtccaactccaagaaa |
| | | gcggaccgggtcttgtgaagccatcagaaactctttcactgacttgtactgtgagc |
| | | ggagtgtctctccccgattacggggtgtcttggatcagacagccaccggggaaggg |
| | | tctggaatggattggagtgatttggggctctgagactacttactacaattcatccc |
| | | tcaagtcacgcgtcaccatctcaaaggacaactctaagaatcaggtgtcactgaaa |
| | | ctgtcatctgtgaccgcagccgacaccgccgtgtactattgcgctaagcattacta |
| | | ttatggcgggagctacgcaatggattactggggacagggtactctggtcaccgtgt |
| | | ccagccaccaccatcatcaccatcaccat |
| 103101 | 945 | MALPVTALLLPLALLLHAARPeivmtqspatlslspgeratlscrasqdiskylnw |
| CAR 11- | | yqqkpgqaprlliyhtsrlhsgiparfsgsgsgtdytltisslqpedfavyfcqqg |
| Soluble scFv- | | ntlpytfgqgtkleikggggsggggsggggsqvqlqesgpglvkpsetlsltctvs |
| aa | | gvslpdygvswirqppgkglewigviwgsettyynsslksrvtiskdnsknqvslk |
| | | lssvtaadtavyycakhyyyggsyamdywgqgtlvtvsshhhhhhhh |
| 105976 CAR | 946 | atggctctgcccgtgaccgcactcctcctgccactggctctgctgcttcacgccgc |
| 11 Full-nt | | tcgcccacaagtccagcttcaagaatcagggcctggtctggtgaagccatctgaga |
| | | ctctgtccctcacttgcaccgtgagcggagtgtccctcccagactacggagtgagc |
| | | tggattagacagcctcccggaaagggactggagtggatcggagtgatttggggtag |
| | | cgaaaccacttactataactcttccctgaagtcacgggtcaccatttcaaaggata |
| | | actcaaagaatcaagtgagcctcaagctctcatcagtcaccgccgctgacaccgcc |
| | | gtgtattactgtgccaagcattactactatggagggtcctacgccatggactactg |
| | | gggccagggaactctggtcactgtgtcatctggtggaggaggtagcggaggaggcg |
| | | ggagcggtggaggtggctccggaggtggcggaagcgaaatcgtgatgacccagagc |
| | | cctgcaaccctgtccctttctcccggggaacgggctaccctttcttgtcgggcatc |
| | | acaagatatctcaaaatacctcaattggtatcaacagaagccgggacaggccccta |
| | | ggcttcttatctaccacacctctcgcctgcatagcgggattcccgcacgctttagc |
| | | gggtctggaagcgggaccgactacactctgaccatctcatctctccagcccgagga |
| | | cttcgccgtctacttctgccagcagggtaacaccctgccgtacaccttcggccagg |
| | | gcaccaagcttgagatcaaaaccactactcccgctccaaggccacccacccctgcc |
| | | ccgaccatcgcctctcagccgctttccctgcgtccggaggcatgtagacccgcagc |
| | | tggtggggccgtgcatacccggggtcttgacttcgcctgcgatatctacatttggg |
| | | cccctctggctggtacttgcggggtcctgctgctttcactcgtgatcactctttac |
| | | tgtaagcgcggtcggaagaagctgctgtacatctttaagcaacccttcatgaggcc |
| | | tgtgcagactactcaagaggaggacggctgttcatgccggttcccagaggaggagg |
| | | aaggcggctgcgaactgcgcgtgaaattcagccgcagcgcagatgctccagcctac |
| | | aagcaggggcagaaccagctctacaacgaactcaatcttggtcggagagaggagta |
| | | cgacgtgctggacaagcggagaggacgggacccagaaatgggcgggaagccgcgca |
| | | gaaagaatccccaagagggcctgtacaacgagctccaaaaggataagatggcagaa |
| | | gcctatagcgagattggtatgaaaggggaacgcagaagaggcaaaggccacgacgg |
| | | actgtaccagggactcagcaccgccaccaaggacacctatgacgctcttcacatgc |
| | | aggccctgccgcctcgg |
| 105976 | 947 | MALPVTALLLPLALLLHAARPQVQLQESGPGLVKPSETLSLTCTVSGVSLPDYGVS |
| CAR 11 Full- | | WIRQPPGKGLEWIGVIWGSETTYYNSSLKSRVTISKDNSKNQVSLKLSSVTAADTA |
| aa | | VYYCAKHYYYGGSYAMDYWGQGTLVTVSSGGGGSGGGGSGGGGSGGGGSEIVMTQS |
| | | PATLSLSPGERATLSCRASQDISKYLNWYQQKPGQAPRLLIYHTSRLHSGIPARFS |
| | | GSGSGTDYTLTISSLQPEDFAVYFCQQGNTLPYTFGQGTKLEIKTTTPAPRPPTPA |
| | | PTIASQPLSLRPEACRPAAGGAVHTRGLDFACDIYIWAPLAGTCGVLLLSLVITLY |
| | | CKRGRKKLLYIFKQPFMRPVQTTQEEDGCSCRFPEEEEGGCELRVKFSRSADAPAY |
| | | KQGQNQLYNELNLGRREEYDVLDKRRGRDPEMGGKPRRKNPQEGLYNELQKDKMAE |
| | | AYSEIGMKGERRRGKGHDGLYQGLSTATKDTYDALHMQALPPR |

CAR 12

| | | |
|---|---|---|
| CAR 12 | 948 | qvqlqesgpglvkpsetlsltctvsgvslpdygvswirqppgkglewigviwgset |
| scFv domain | | tyynsslksrvtiskdnsknqvslklssvtaadtavyycakhyyyggsyamdywgq |
| | | gtlvtvssggggsggggsggggseivmtqspatlslspgeratlscrasqdiskyl |
| | | nwyqqkpgqaprlliyhtsrlhsgiparfsgsgsgtdytltisslqpedfavyfcq |
| | | qgntlpytfgqgtkleik |
| 103104 | 949 | atggctctgcccgtgaccgcactcctcctgccactggctctgctgcttcacgccgc |
| CAR 12- | | tcgcccacaagtccagcttcaagaatcagggcctggtctggtgaagccatctgaga |
| Soluble scFv- | | ctctgtccctcacttgcaccgtgagcggagtgtccctcccagactacggagtgagc |
| nt | | tggattagacagcctcccggaaagggactggagtggatcggagtgatttggggtag |
| | | cgaaaccacttactataactcttccctgaagtcacgggtcaccatttcaaaggata |
| | | actcaaagaatcaagtgagcctcaagctctcatcagtcaccgccgctgacaccgcc |
| | | gtgtattactgtgccaagcattactactatggagggtcctacgccatggactactg |
| | | gggccagggaactctggtcactgtgtcatctggtggaggaggtagcggaggaggcg |
| | | ggagcggtggaggtggctccgaaatcgtgatgacccagagccctgcaaccctgtcc |
| | | ctttctcccggggaacgggctaccctttcttgtcgggcatcacaagatatctcaaa |
| | | atacctcaattggtatcaacagaagccgggacaggcccctaggcttcttatctacc |
| | | acacctctcgcctgcatagcgggattcccgcacgctttagcgggtctggaagcggg |
| | | accgactacactctgaccatctcatctctccagcccgaggacttcgccgtctactt |
| | | ctgccagcagggtaacaccctgccgtacaccttcggccagggcaccaagcttgaga |
| | | tcaaacatcaccaccatcatcaccatcac |
| 103104 | 950 | MALPVTALLLPLALLLHAARPqvqlqesgpglvkpsetlsltctvsgvslpdygvs |
| CAR 12- | | wirqppgkglewigviwgsettyynsslksrvtiskdnsknqvslklssvtaadta |
| Soluble scFv- | | vyycakhyyyggsyamdywgqgtlvtvssggggsggggsggggseivmtqspatls |
| aa | | lspgeratlscrasqdiskylnwyqqkpgqaprlliyhtsrlhsgiparfsgsgsg |
| | | tdytltisslqpedfavyfcqqgntlpytfgqgtkleikhhhhhhhh |
| 105977 | 951 | atggccctccctgtcaccgccctgctgcttccgctggctcttctgctccacgccgc |
| CAR 12- | | tcggcccgaaattgtgatgacccagtcacccgccactcttagcctttcacccggtg |
| Full-nt | | agcgcgcaaccctgtcttgcagagcctcccaagacatctcaaaataccttaattgg |
| | | tatcaacagaagcccggacaggctcctcgccttctgatctaccacaccagccggct |
| | | ccattctggaatccctgccaggttcagcggtagcggatctgggaccgactacaccc |
| | | tcactatcagctcactgcagccagaggacttcgctgtctatttctgtcagcaaggg |
| | | aacaccctgccctacacctttggacagggcaccaagctcgagattaaaggtggagg |
| | | tggcagcggaggaggtgggtccggcggtggaggaagccaggtccaactccaagaaa |
| | | gcggaccgggtcttgtgaagccatcagaaactctttcactgacttgtactgtgagc |
| | | ggagtgtctctccccgattacggggtgtcttggatcagacagccaccggggaaggg |
| | | tctggaatggattggagtgatttggggctctgagactacttactacaactcatccc |
| | | tcaagtcacgcgtcaccatctcaaaggacaactctaagaatcaggtgtcactgaaa |
| | | ctgtcatctgtgaccgcagccgacaccgccgtgtactattgcgctaagcattacta |
| | | ttatggcgggagctacgcaatggattactggggacagggtactctggtcaccgtgt |
| | | ccagcaccactaccccagcaccgaggccacccaccccggctcctaccatcgcctcc |
| | | cagcctctgtccctgcgtccggaggcatgtagacccgcagctggtggggccgtgca |
| | | tacccggggtcttgacttcgcctgcgatatctacatttgggcccctctggctggta |
| | | cttgcggggtcctgctgctttcactcgtgatcactctttactgtaagcgcggtcgg |
| | | aagaagctgctgtacatctttaagcaacccttcatgaggcctgtgcagactactca |
| | | agaggaggacggctgttcatgccggttcccagaggaggaggaaggcggctgcgaac |
| | | tgcgcgtgaaattcagccgcagcgcagatgctccagcctacaagcaggggcagaac |
| | | cagctctacaacgaactcaatcttggtcggagagaggagtacgacgtgctggacaa |
| | | gcggagaggacgggacccagaaatgggcgggaagccgcgcagaaagaatccccaag |
| | | agggcctgtacaacgagctccaaaaggataagatggcagaagcctatagcgagatt |
| | | ggtatgaaaggggaacgcagaagaggcaaaggccacgacggactgtaccagggact |
| | | cagcaccgccaccaaggacacctatgacgctcttcacatgcaggccctgccgcctc |
| | | gg |
| 105977 | 952 | MALPVTALLLPLALLLHAARPEIVMTQSPATLSLSPGERATLSCRASQDISKYLNW |
| CAR 12- | | YQQKPGQAPRLLIYHTSRLHSGIPARFSGSGSGTDYTLTISSLQPEDFAVYFCQQG |
| Full-aa | | NTLPYTFGQGTKLEIKGGGGSGGGGSGGGGSQVQLQESGPGLVKPSETLSLTCTVS |
| | | GVSLPDYGVSWIRQPPGKGLEWIGVIWGSETTYYNSSLKSRVTISKDNSKNQVSLK |
| | | LSSVTAADTAVYYCAKHYYYGGSYAMDYWGQGTLVTVSSTTTPAPRPPTPAPTIAS |
| | | QPLSLRPEACRPAAGGAVHTRGLDFACDIYIWAPLAGTCGVLLLSLVITLYCKRGR |
| | | KKLLYIFKQPFMRPVQTTQEEDGCSCRFPEEEEGGCELRVKFSRSADAPAYKQGQN |
| | | QLYNELNLGRREEYDVLDKRRGRDPEMGGKPRRKNPQEGLYNELQKDKMAEAYSEI |
| | | GMKGERRRGKGHDGLYQGLSTATKDTYDALHMQALPPR |

CTL019

| | | |
|---|---|---|
| CTL019- | 953 | atggccctgcccgtcaccgctctgctgctgccccttgctctgcttcttcatgcagc |
| Soluble | | aaggccggacatccagatgacccaaaccacctcatccctctctgcctctcttggag |
| scFv-Histag- | | acagggtgaccatttcttgtcgcgccagccaggacatcagcaagtatctgaactgg |
| nt | | tatcagcagaagccggacggaaccgtgaagctcctgatctaccatacctctcgcct |
| | | gcatagcggcgtgccctcacgcttctctggaagcggatcaggaaccgattattctc |
| | | tcactatttcaaatcttgagcaggaagatattgccacctatttctgccagcagggt |
| | | aataccctgccctacaccttcggaggagggaccaagctcgaaatcaccggtggagg |
| | | aggcagcggcggtggagggtctggtggaggtggttctgaggtgaagctgcaagaat |
| | | caggccctggacttgtggccccttcacagtccctgagcgtgacttgcaccgtgtcc |
| | | ggagtctccctgcccgactacggagtgtcatggatcagacaacctccacggaaagg |
| | | actggaatggctcggtgtcatctggggtagcgaaactacttactacaattcagccc |
| | | tcaaaagcaggctgactattatcaaggacaacagcaagtcccaagtctttcttaag |
| | | atgaactcactccagactgacgacaccgcaatctactattgtgctaagcactacta |
| | | ctacggaggatcctacgctatggattactggggacaaggtacttccgtcactgtct |
| | | cttcacaccatcatcaccatcaccatcac |
| CTL019- | 954 | MALPVTALLLPLALLLHAARPdiqmtqttsslsaslgdrvtiscrasqdiskylnw |
| Soluble | | yqqkpdgtvklliyhtsrlhsgvpsrfsgsgsgtdysltisnleqediatyfcqqg |
| scFv-Histag- | | ntlpytfgggtkleitggggsggggsggggsevklqesgpglvapsqslsvtctvs |
| aa | | gvslpdygvswirqpprkglewlgviwgsettyynsalksrltiikdnsksqvflk |
| | | mnslqtddtaiyycakhyyyggsyamdywgqgtsvtvsshhhhhhhh |
| CTL019 Full- | 955 | atggccttaccagtgaccgccttgctcctgccgctggccttgctgctccacgccgc |
| nt | | caggccggacatccagatgacacagactacatcctccctgtctgcctctctgggag |
| | | acagagtcaccatcagttgcagggcaagtcaggacattagtaaatatttaaattgg |
| | | tatcagcagaaaccagatggaactgttaaactcctgatctaccatacatcaagatt |
| | | acactcaggagtcccatcaaggttcagtggcagtgggtctggaacagattattctc |
| | | tcaccattagcaacctggagcaagaagatattgccacttacttttgccaacagggt |
| | | aatacgcttccgtacacgttcggaggggggaccaagctggagatcacaggtggcgg |
| | | tggctcgggcggtggtgggtcgggtggcggcggatctgaggtgaaactgcaggagt |
| | | caggacctggcctggtggcgccctcacagagcctgtccgtcacatgcactgtctca |
| | | ggggtctcattacccgactatggtgtaagctggattcgccagcctccacgaaaggg |
| | | tctggagtggctgggagtaatatggggtagtgaaaccacatactataattcagctc |
| | | tcaaatccagactgaccatcatcaaggacaactccaagagccaagttttcttaaaa |
| | | atgaacagtctgcaaactgatgacacagccatttactactgtgccaaacattatta |
| | | ctacggtggtagctatgctatggactactggggccaaggaacctcagtcaccgtct |
| | | cctcaaccacgacgccagcgccgcgaccaccaacaccggcgcccaccatcgcgtcg |
| | | cagcccctgtccctgcgcccagaggcgtgccggccagcggcggggggcgcagtgca |
| | | cacgagggggctggacttcgcctgtgatatctacatctgggcgcccttggccggga |
| | | cttgtggggtccttctcctgtcactggttatcaccctttactgcaaacggggcaga |
| | | aagaaactcctgtatatattcaaacaaccatttatgagaccagtacaaactactca |
| | | agaggaagatggctgtagctgccgatttccagaagaagaagaaggaggatgtgaac |
| | | tgagagtgaagttcagcaggagcgcagacgcccccgcgtacaagcagggccagaac |
| | | cagctctataacgagctcaatctaggacgaagagaggagtacgatgttttggacaa |
| | | gagacgtggccgggaccctgagatggggggaaagccgagaaggaagaaccctcagg |
| | | aaggcctgtacaatgaactgcagaaagataagatggcggaggcctacagtgagatt |
| | | gggatgaaaggcgagcgccggaggggcaaggggcacgatggcctttaccagggtct |
| | | cagtacagccaccaaggacacctacgacgcccttcacatgcaggccctgccccctc |
| | | gc |
| CTL019 Full- | 956 | MALPVTALLLPLALLLHAARPdiqmtqttsslsaslgdrvtiscrasqdiskylnw |
| aa | | yqqkpdgtvklliyhtsrlhsgvpsrfsgsgsgtdysltisnleqediatyfcqqg |
| | | ntlpytfgggtkleitggggsggggsggggsevklqesgpglvapsqslsvtctvs |
| | | gvslpdygvswirqpprkglewlgviwgsettyynsalksrltiikdnsksqvflk |
| | | mnslqtddtaiyycakhyyyggsyamdywgqgtsvtvsstttpaprpptpaptias |
| | | qplslrpeacrpaaggavhtrgldfacdiyiwaplagtcgvlllslvitlyckrgr |
| | | kkllyifkqpfmrpvqttgeedgcscrfpeeeeggcelrvkfsrsadapaykqgqn |
| | | qlynelnlgrreeydvldkrrgrdpemggkprrknpqeglynelqkdkmaeaysei |
| | | gmkgerrrgkghdglyqglstatkdtydalhmqalppr |
| CTL019 scFv | 957 | diqmtqttsslsaslgdrvtiscrasqdiskylnwyqqkpdgtvklliyhtsrlhs |
| domain | | gvpsrfsgsgsgtdysltisnleqediatyfcqqgntlpytfgggtkleitggggs |
| | | ggggsggggsevklqesgpglvapsqslsvtctvsgvslpdygvswirqpprkgle |
| | | wlgviwgsettyynsalksrltiikdnsksqvflkmnslqtddtaiyycakhyyyg |
| | | gsyamdywgqgtsvtvss |

[0901] In some embodiments, the CD19 CAR or binding domain includes the amino acid sequence of CTL019, or is encoded by the nucleotide sequence of CTL019 according to Table 9 with or without the leader sequence or the his tag, or a sequence substantially identical thereto (e.g., at least 85%, 90%, 95% or higher identity).

[0902] In some embodiments, the CDRs are defined according to the Kabat numbering scheme, the Chothia numbering scheme, or a combination thereof.

[0903] The sequences of humanized CDR sequences of the scFv domains are shown in Table 10A for the heavy chain variable domains and in Table 10B for the light chain variable domains. “ID” stands for the respective SEQ ID NO for each CDR.

TABLE 10A
Heavy Chain Variable Domain CDRs (according to Kabat)

| | | | SEQ | | SEQ | | SEQ |
|---|---|---|---|---|---|---|---|
| Candidate | FW | HCDR1 | ID | HCDR2 | ID | HCDR3 | ID |
| murine_CART19 | | DYGVS | 958 | VIWGSETTYYNSALKS | 959 | HYYYGGSYAMDY | 960 |
| humanized_CART19 a | VH4 | DYGVS | 958 | VIWGSETTYY [symbol] S [symbol] LKS | 961 | HYYYGGSYAMDY | 960 |
| humanized_CART19 b | VH4 | DYGVS | 958 | VIWGSETTYY [symbol] S [symbol] LKS | 962 | HYYYGGSYAMDY | 960 |
| humanized_CART19 c | VH4 | DYGVS | 958 | VIWGSETTYYNS [symbol] LKS | 963 | HYYYGGSYAMDY | 960 |

TABLE 10B
Light Chain Variable Domain CDRs (according to Kabat)

| | | | SEQ | | SEQ | | SEQ |
|---|---|---|---|---|---|---|---|
| Candidate | FW | LCDR1 | ID | LCDR2 | ID | LCDR3 | ID |
| murine_CART19 | | RASQDISKYLN | 964 | HTSRLHS | 965 | QQGNTLPYT | 966 |
| humanized_CART19 a | VK3 | RASQDISKYLN | 964 | HTSRLHS | 965 | QQGNTLPYT | 966 |
| humanized_CART19 b | VK3 | RASQDISKYLN | 964 | HTSRLHS | 965 | QQGNTLPYT | 966 |
| humanized_CART19 c | VK3 | RASQDISKYLN | 964 | HTSRLHS | 965 | QQGNTLPYT | 966 |

[0904] In one embodiment, the CAR molecule comprises a BCMA CAR molecule described herein, e.g., a BCMA CAR described in US-2016-0046724-A1 or WO2016/014565. In embodiments, the BCMA CAR comprises an amino acid, or has a nucleotide sequence of a CAR molecule, or an antigen binding domain according to US-2016-0046724-A1, or Table 1 or 16, SEQ ID NO: 271 or SEQ ID NO: 273 of WO2016/014565, incorporated herein by reference, or a sequence substantially identical to any of the aforesaid sequences (e.g., at least 85%, 90%, 95% or more identical to any of the aforesaid BCMA CAR sequences). The amino acid and nucleotide sequences encoding the BCMA CAR molecules and antigen binding domains (e.g., including one, two, three VH CDRs; and one, two, three VL CDRs according to Kabat or Chothia), are specified in WO2016/014565.

[0905] In embodiments, the BCMA CAR comprises an anti-BCMA binding domain (e.g., human or humanized anti-BCMA binding domain), a transmembrane domain, and an intracellular signaling domain, and wherein said anti-BCMA binding domain comprises a heavy chain complementary determining region 1 (HC CDR1), a heavy chain complementary determining region 2 (HC CDR2), and a heavy chain complementary determining region 3 (HC CDR3) of any anti-BMCA heavy chain binding domain amino acid sequences listed in Table 11 A or 111B, or a sequence at least 85%, 90%, 95% or more identical thereto (e.g., having less than 5, 4, 3, 2 or 1 amino acid substitutions, e.g., conservative substitutions).

[0906] In one embodiment, the anti-BCMA binding domain comprises a light chain variable region described herein (e.g., in Table 11 A or 11B) and/or a heavy chain variable region described herein (e.g., in Table 11A or 11B), or a sequence at least 85%, 90%, 95% or more identical thereto.

[0907] In one embodiment, the encoded anti-BCMA binding domain is a scFv comprising a light chain and a heavy chain of an amino acid sequence of Table 11 A or 111B.

[0908] In an embodiment, the human or humanized anti-BCMA binding domain (e.g., an scFv) comprises: a light chain variable region comprising an amino acid sequence having at least one, two or three modifications (e.g., substitutions, e.g., conservative substitutions) but not more than 30, 20 or 10 modifications (e.g., substitutions, e.g., conservative substitutions) of an amino acid sequence of a light chain variable region provided in Table 11 A or 11B, or a sequence at least 85%, 90%, 95% or more identical thereto; and/or a heavy chain variable region comprising an amino acid sequence having at least one, two or three modifications (e.g., substitutions, e.g., conservative substitutions) but not more than 30, or 10 modifications (e.g., substitutions, e.g., conservative substitutions) of an amino acid sequence of a heavy chain variable region provided in Table 11 A or 11B, or a sequence at least 85%, 90%, 95% or more identical thereto.

TABLE 11A
Amino Acid and Nucleic Acid Sequences of exemplary
anti-BCMA scFv domains and BCMA CAR molecules

| | | |
|---|---|---|
| | SEQ | |
| Name/ | ID | |
| Description | NO: | Sequence |

139109

| | | |
|---|---|---|
| 139109-aa | 967 | EVQLVESGGGLVQPGGSLRLSCAVSGFALSNHGMSWVRRAPGKGLEWV |
| ScFv domain | | SGIVYSGSTYYAASVKGRFTISRDNSRNTLYLQMNSLRPEDTAIYYCS |
| | | AHGGESDVWGQGTTVTVSSASGGGGSGGRASGGGGSDIQLTQSPSSLS |
| | | ASVGDRVTITCRASQSISSYLNWYQQKPGKAPKLLIYAASSLQSGVPS |
| | | RFSGSGSGTDFTLTISSLQPEDFATYYCQQSYSTPYTFGQGTKVEIK |
| 139109-nt | 968 | GAAGTGCAATTGGTGGAATCAGGGGGAGGACTTGTGCAGCCTGGAGGA |
| ScFv domain | | TCGCTGAGACTGTCATGTGCCGTGTCCGGCTTTGCCCTGTCCAACCAC |
| | | GGGATGTCCTGGGTCCGCCGCGCGCCTGGAAAGGGCCTCGAATGGGTG |
| | | TCGGGTATTGTGTACAGCGGTAGCACCTACTATGCCGCATCCGTGAAG |
| | | GGGAGATTCACCATCAGCCGGGACAACTCCAGGAACACTCTGTACCTC |
| | | CAAATGAATTCGCTGAGGCCAGAGGACACTGCCATCTACTACTGCTCC |
| | | GCGCATGGCGGAGAGTCCGACGTCTGGGGACAGGGGACCACCGTGACC |
| | | GTGTCTAGCGCGTCCGGCGGAGGCGGCAGCGGGGGTCGGGCATCAGGG |
| | | GGCGGCGGATCGGACATCCAGCTCACCCAGTCCCCGAGCTCGCTGTCC |
| | | GCCTCCGTGGGAGATCGGGTCACCATCACGTGCCGCGCCAGCCAGTCG |
| | | ATTTCCTCCTACCTGAACTGGTACCAACAGAAGCCCGGAAAAGCCCCG |
| | | AAGCTTCTCATCTACGCCGCCTCGAGCCTGCAGTCAGGAGTGCCCTCA |
| | | CGGTTCTCCGGCTCCGGTTCCGGTACTGATTTCACCCTGACCATTTCC |
| | | TCCCTGCAACCGGAGGACTTCGCTACTTACTACTGCCAGCAGTCGTAC |
| | | TCCACCCCCTACACTTTCGGACAAGGCACCAAGGTCGAAATCAAG |
| 139109-aa | 969 | EVQLVESGGGLVQPGGSLRLSCAVSGFALSNHGMSWVRRAPGKGLEWV |
| VH | | SGIVYSGSTYYAASVKGRFTISRDNSRNTLYLQMNSLRPEDTAIYYCS |
| | | AHGGESDVWGQGTTVTVSS |
| 139109-aa | 970 | DIQLTQSPSSLSASVGDRVTITCRASQSISSYLNWYQQKPGKAPKLLI |
| VL | | YAASSLQSGVPSRFSGSGSGTDFTLTISSLQPEDFATYYCQQSYSTPY |
| | | TFGQGTKVEIK |
| 139109-aa | 971 | MALPVTALLLPLALLLHAARPEVQLVESGGGLVQPGGSLRLSCAVSGF |
| Full CAR | | ALSNHGMSWVRRAPGKGLEWVSGIVYSGSTYYAASVKGRFTISRDNSR |
| | | NTLYLQMNSLRPEDTAIYYCSAHGGESDVWGQGTTVTVSSASGGGGSG |
| | | GRASGGGGSDIQLTQSPSSLSASVGDRVTITCRASQSISSYLNWYQQK |
| | | PGKAPKLLIYAASSLQSGVPSRFSGSGSGTDFTLTISSLQPEDFATYY |
| | | CQQSYSTPYTFGQGTKVEIKTTTPAPRPPTPAPTIASQPLSLRPEACR |
| | | PAAGGAVHTRGLDFACDIYIWAPLAGTCGVLLLSLVITLYCKRGRKKL |
| | | LYIFKQPFMRPVQTTQEEDGCSCRFPEEEEGGCELRVKFSRSADAPAY |
| | | KQGQNQLYNELNLGRREEYDVLDKRRGRDPEMGGKPRRKNPQEGLYNE |
| | | LQKDKMAEAYSEIGMKGERRRGKGHDGLYQGLSTATKDTYDALHMQAL |
| | | PPR |
| 139109-nt | 972 | ATGGCCCTCCCTGTCACCGCCCTGCTGCTTCCGCTGGCTCTTCTGCTC |
| Full CAR | | CACGCCGCTCGGCCCGAAGTGCAATTGGTGGAATCAGGGGGAGGACTT |
| | | GTGCAGCCTGGAGGATCGCTGAGACTGTCATGTGCCGTGTCCGGCTTT |
| | | GCCCTGTCCAACCACGGGATGTCCTGGGTCCGCCGCGCGCCTGGAAAG |
| | | GGCCTCGAATGGGTGTCGGGTATTGTGTACAGCGGTAGCACCTACTAT |
| | | GCCGCATCCGTGAAGGGGAGATTCACCATCAGCCGGGACAACTCCAGG |
| | | AACACTCTGTACCTCCAAATGAATTCGCTGAGGCCAGAGGACACTGCC |
| | | ATCTACTACTGCTCCGCGCATGGCGGAGAGTCCGACGTCTGGGGACAG |
| | | GGGACCACCGTGACCGTGTCTAGCGCGTCCGGCGGAGGCGGCAGCGGG |
| | | GGTCGGGCATCAGGGGGCGGCGGATCGGACATCCAGCTCACCCAGTCC |
| | | CCGAGCTCGCTGTCCGCCTCCGTGGGAGATCGGGTCACCATCACGTGC |
| | | CGCGCCAGCCAGTCGATTTCCTCCTACCTGAACTGGTACCAACAGAAG |
| | | CCCGGAAAAGCCCCGAAGCTTCTCATCTACGCCGCCTCGAGCCTGCAG |
| | | TCAGGAGTGCCCTCACGGTTCTCCGGCTCCGGTTCCGGTACTGATTTC |
| | | ACCCTGACCATTTCCTCCCTGCAACCGGAGGACTTCGCTACTTACTAC |
| | | TGCCAGCAGTCGTACTCCACCCCCTACACTTTCGGACAAGGCACCAAG |
| | | GTCGAAATCAAGACCACTACCCCAGCACCGAGGCCACCCACCCCGGCT |
| | | CCTACCATCGCCTCCCAGCCTCTGTCCCTGCGTCCGGAGGCATGTAGA |
| | | CCCGCAGCTGGTGGGGCCGTGCATACCCGGGGTCTTGACTTCGCCTGC |
| | | GATATCTACATTTGGGCCCCTCTGGCTGGTACTTGCGGGGTCCTGCTG |
| | | CTTTCACTCGTGATCACTCTTTACTGTAAGCGCGGTCGGAAGAAGCTG |
| | | CTGTACATCTTTAAGCAACCCTTCATGAGGCCTGTGCAGACTACTCAA |
| | | GAGGAGGACGGCTGTTCATGCCGGTTCCCAGAGGAGGAGGAAGGCGGC |
| | | TGCGAACTGCGCGTGAAATTCAGCCGCAGCGCAGATGCTCCAGCCTAC |
| | | AAGCAGGGGCAGAACCAGCTCTACAACGAACTCAATCTTGGTCGGAGA |
| | | GAGGAGTACGACGTGCTGGACAAGCGGAGAGGACGGGACCCAGAAATG |
| | | GGCGGGAAGCCGCGCAGAAAGAATCCCCAAGAGGGCCTGTACAACGAG |
| | | CTCCAAAAGGATAAGATGGCAGAAGCCTATAGCGAGATTGGTATGAAA |
| | | GGGGAACGCAGAAGAGGCAAAGGCCACGACGGACTGTACCAGGGACTC |
| | | AGCACCGCCACCAAGGACACCTATGACGCTCTTCACATGCAGGCCCTG |
| | | CCGCCTCGG |

139103

| | | |
|---|---|---|
| 139103-aa | 973 | QVQLVESGGGLVQPGRSLRLSCAASGFTFSNYAMSWVRQAPGKGLGWV |
| ScFv domain | | SGISRSGENTYYADSVKGRFTISRDNSKNTLYLQMNSLRDEDTAVYYC |
| | | ARSPAHYYGGMDVWGQGTTVTVSSASGGGGSGGRASGGGGSDIVLTQS |
| | | PGTLSLSPGERATLSCRASQSISSSFLAWYQQKPGQAPRLLIYGASRR |
| | | ATGIPDRFSGSGSGTDFTLTISRLEPEDSAVYYCQQYHSSPSWTFGQG |
| | | TKLEIK |
| 139103-nt | 974 | CAAGTGCAACTCGTGGAATCTGGTGGAGGACTCGTGCAACCCGGAAGA |
| ScFv domain | | TCGCTTAGACTGTCGTGTGCCGCCAGCGGGTTCACTTTCTCGAACTAC |
| | | GCGATGTCCTGGGTCCGCCAGGCACCCGGAAAGGGACTCGGTTGGGTG |
| | | TCCGGCATTTCCCGGTCCGGCGAAAATACCTACTACGCCGACTCCGTG |
| | | AAGGGCCGCTTCACCATCTCAAGGGACAACAGCAAAAACACCCTGTAC |
| | | TTGCAAATGAACTCCCTGCGGGATGAAGATACAGCCGTGTACTATTGC |
| | | GCCCGGTCGCCTGCCCATTACTACGGCGGAATGGACGTCTGGGGACAG |
| | | GGAACCACTGTGACTGTCAGCAGCGCGTCGGGTGGCGGCGGCTCAGGG |
| | | GGTCGGGCCTCCGGGGGGGGAGGGTCCGACATCGTGCTGACCCAGTCC |
| | | CCGGGAACCCTGAGCCTGAGCCCGGGAGAGCGCGCGACCCTGTCATGC |
| | | CGGGCATCCCAGAGCATTAGCTCCTCCTTTCTCGCCTGGTATCAGCAG |
| | | AAGCCCGGACAGGCCCCGAGGCTGCTGATCTACGGCGCTAGCAGAAGG |
| | | GCTACCGGAATCCCAGACCGGTTCTCCGGCTCCGGTTCCGGGACCGAT |
| | | TTCACCCTTACTATCTCGCGCCTGGAACCTGAGGACTCCGCCGTCTAC |
| | | TACTGCCAGCAGTACCACTCATCCCCGTCGTGGACGTTCGGACAGGGC |
| | | ACCAAGCTGGAGATTAAG |
| 139103-aa | 975 | QVQLVESGGGLVQPGRSLRLSCAASGFTFSNYAMSWVRQAPGKGLGWV |
| VH | | SGISRSGENTYYADSVKGRFTISRDNSKNTLYLQMNSLRDEDTAVYYC |
| | | ARSPAHYYGGMDVWGQGTTVTVSS |
| 139103-aa | 976 | DIVLTQSPGTLSLSPGERATLSCRASQSISSSFLAWYQQKPGQAPRLL |
| VL | | IYGASRRATGIPDRFSGSGSGTDFTLTISRLEPEDSAVYYCQQYHSSP |
| | | SWTFGQGTKLEIK |
| 139103-aa | 977 | MALPVTALLLPLALLLHAARPQVQLVESGGGLVQPGRSLRLSCAASGF |
| Full CAR | | TFSNYAMSWVRQAPGKGLGWVSGISRSGENTYYADSVKGRFTISRDNS |
| | | KNTLYLQMNSLRDEDTAVYYCARSPAHYYGGMDVWGQGTTVTVSSASG |
| | | GGGSGGRASGGGGSDIVLTQSPGTLSLSPGERATLSCRASQSISSSFL |
| | | AWYQQKPGQAPRLLIYGASRRATGIPDRFSGSGSGTDFTLTISRLEPE |
| | | DSAVYYCQQYHSSPSWTFGQGTKLEIKTTTPAPRPPTPAPTIASQPLS |
| | | LRPEACRPAAGGAVHTRGLDFACDIYIWAPLAGTCGVLLLSLVITLYC |
| | | KRGRKKLLYIFKQPFMRPVQTTQEEDGCSCRFPEEEEGGCELRVKFSR |
| | | SADAPAYKQGQNQLYNELNLGRREEYDVLDKRRGRDPEMGGKPRRKNP |
| | | QEGLYNELQKDKMAEAYSEIGMKGERRRGKGHDGLYQGLSTATKDTYD |
| | | ALHMQALPPR |
| 139103-nt | 978 | ATGGCCCTCCCTGTCACCGCCCTGCTGCTTCCGCTGGCTCTTCTGCTC |
| Full CAR | | CACGCCGCTCGGCCCCAAGTGCAACTCGTGGAATCTGGTGGAGGACTC |
| | | GTGCAACCCGGAAGATCGCTTAGACTGTCGTGTGCCGCCAGCGGGTTC |
| | | ACTTTCTCGAACTACGCGATGTCCTGGGTCCGCCAGGCACCCGGAAAG |
| | | GGACTCGGTTGGGTGTCCGGCATTTCCCGGTCCGGCGAAAATACCTAC |
| | | TACGCCGACTCCGTGAAGGGCCGCTTCACCATCTCAAGGGACAACAGC |
| | | AAAAACACCCTGTACTTGCAAATGAACTCCCTGCGGGATGAAGATACA |
| | | GCCGTGTACTATTGCGCCCGGTCGCCTGCCCATTACTACGGCGGAATG |
| | | GACGTCTGGGGACAGGGAACCACTGTGACTGTCAGCAGCGCGTCGGGT |
| | | GGCGGCGGCTCAGGGGGTCGGGCCTCCGGGGGGGGAGGGTCCGACATC |
| | | GTGCTGACCCAGTCCCCGGGAACCCTGAGCCTGAGCCCGGGAGAGCGC |
| | | GCGACCCTGTCATGCCGGGCATCCCAGAGCATTAGCTCCTCCTTTCTC |
| | | GCCTGGTATCAGCAGAAGCCCGGACAGGCCCCGAGGCTGCTGATCTAC |
| | | GGCGCTAGCAGAAGGGCTACCGGAATCCCAGACCGGTTCTCCGGCTCC |
| | | GGTTCCGGGACCGATTTCACCCTTACTATCTCGCGCCTGGAACCTGAG |
| | | GACTCCGCCGTCTACTACTGCCAGCAGTACCACTCATCCCCGTCGTGG |
| | | ACGTTCGGACAGGGCACCAAGCTGGAGATTAAGACCACTACCCCAGCA |
| | | CCGAGGCCACCCACCCCGGCTCCTACCATCGCCTCCCAGCCTCTGTCC |
| | | CTGCGTCCGGAGGCATGTAGACCCGCAGCTGGTGGGGCCGTGCATACC |
| | | CGGGGTCTTGACTTCGCCTGCGATATCTACATTTGGGCCCCTCTGGCT |
| | | GGTACTTGCGGGGTCCTGCTGCTTTCACTCGTGATCACTCTTTACTGT |
| | | AAGCGCGGTCGGAAGAAGCTGCTGTACATCTTTAAGCAACCCTTCATG |
| | | AGGCCTGTGCAGACTACTCAAGAGGAGGACGGCTGTTCATGCCGGTTC |
| | | CCAGAGGAGGAGGAAGGCGGCTGCGAACTGCGCGTGAAATTCAGCCGC |
| | | AGCGCAGATGCTCCAGCCTACAAGCAGGGGCAGAACCAGCTCTACAAC |
| | | GAACTCAATCTTGGTCGGAGAGAGGAGTACGACGTGCTGGACAAGCGG |
| | | AGAGGACGGGACCCAGAAATGGGCGGGAAGCCGCGCAGAAAGAATCCC |
| | | CAAGAGGGCCTGTACAACGAGCTCCAAAAGGATAAGATGGCAGAAGCC |
| | | TATAGCGAGATTGGTATGAAAGGGGAACGCAGAAGAGGCAAAGGCCAC |
| | | GACGGACTGTACCAGGGACTCAGCACCGCCACCAAGGACACCTATGAC |
| | | GCTCTTCACATGCAGGCCCTGCCGCCTCGG |

139105

| | | |
|---|---|---|
| 139105-aa | 979 | QVQLVESGGGLVQPGRSLRLSCAASGFTFDDYAMHWVRQAPGKGLEWV |
| ScFv domain | | SGISWNSGSIGYADSVKGRFTISRDNAKNSLYLQMNSLRAEDTALYYC |
| | | SVHSFLAYWGQGTLVTVSSASGGGGSGGRASGGGGSDIVMTQTPLSLP |
| | | VTPGEPASISCRSSQSLLHSNGYNYLDWYLQKPGQSPQLLIYLGSNRA |
| | | SGVPDRFSGSGSGTDFTLKISRVEAEDVGVYYCMQALQTPYTFGQGTK |
| | | VEIK |
| 139105-nt | 980 | CAAGTGCAACTCGTCGAATCCGGTGGAGGTCTGGTCCAACCTGGTAGA |
| ScFv domain | | AGCCTGAGACTGTCGTGTGCGGCCAGCGGATTCACCTTTGATGACTAT |
| | | GCTATGCACTGGGTGCGGCAGGCCCCAGGAAAGGGCCTGGAATGGGTG |
| | | TCGGGAATTAGCTGGAACTCCGGGTCCATTGGCTACGCCGACTCCGTG |
| | | AAGGGCCGCTTCACCATCTCCCGCGACAACGCAAAGAACTCCCTGTAC |
| | | TTGCAAATGAACTCGCTCAGGGCTGAGGATACCGCGCTGTACTACTGC |
| | | TCCGTGCATTCCTTCCTGGCCTACTGGGGACAGGGAACTCTGGTCACC |
| | | GTGTCGAGCGCCTCCGGCGGCGGGGGCTCGGGTGGACGGGCCTCGGGC |
| | | GGAGGGGGGTCCGACATCGTGATGACCCAGACCCCGCTGAGCTTGCCC |
| | | GTGACTCCCGGAGAGCCTGCATCCATCTCCTGCCGGTCATCCCAGTCC |
| | | CTTCTCCACTCCAACGGATACAACTACCTCGACTGGTACCTCCAGAAG |
| | | CCGGGACAGAGCCCTCAGCTTCTGATCTACCTGGGGTCAAATAGAGCC |
| | | TCAGGAGTGCCGGATCGGTTCAGCGGATCTGGTTCGGGAACTGATTTC |
| | | ACTCTGAAGATTTCCCGCGTGGAAGCCGAGGACGTGGGCGTCTACTAC |
| | | TGTATGCAGGCGCTGCAGACCCCCTATACCTTCGGCCAAGGGACGAAA |
| | | GTGGAGATCAAG |
| 139105-aa | 981 | QVQLVESGGGLVQPGRSLRLSCAASGFTFDDYAMHWVRQAPGKGLEWV |
| VH | | SGISWNSGSIGYADSVKGRFTISRDNAKNSLYLQMNSLRAEDTALYYC |
| | | SVHSFLAYWGQGTLVTVSS |
| 139105-aa | 982 | DIVMTQTPLSLPVTPGEPASISCRSSQSLLHSNGYNYLDWYLQKPGQS |
| VL | | PQLLIYLGSNRASGVPDRFSGSGSGTDFTLKISRVEAEDVGVYYCMQA |
| | | LQTPYTFGQGTKVEIK |
| 139105-aa | 983 | MALPVTALLLPLALLLHAARPQVQLVESGGGLVQPGRSLRLSCAASGF |
| Full CAR | | TFDDYAMHWVRQAPGKGLEWVSGISWNSGSIGYADSVKGRFTISRDNA |
| | | KNSLYLQMNSLRAEDTALYYCSVHSFLAYWGQGTLVTVSSASGGGGSG |
| | | GRASGGGGSDIVMTQTPLSLPVTPGEPASISCRSSQSLLHSNGYNYLD |
| | | WYLQKPGQSPQLLIYLGSNRASGVPDRFSGSGSGTDFTLKISRVEAED |
| | | VGVYYCMQALQTPYTFGQGTKVEIKTTTPAPRPPTPAPTIASQPLSLR |
| | | PEACRPAAGGAVHTRGLDFACDIYIWAPLAGTCGVLLLSLVITLYCKR |
| | | GRKKLLYIFKQPFMRPVQTTQEEDGCSCRFPEEEEGGCELRVKFSRSA |
| | | DAPAYKQGQNQLYNELNLGRREEYDVLDKRRGRDPEMGGKPRRKNPQE |
| | | GLYNELQKDKMAEAYSEIGMKGERRRGKGHDGLYQGLSTATKDTYDAL |
| | | HMQALPPR |
| 139105-nt | 984 | ATGGCCCTCCCTGTCACCGCCCTGCTGCTTCCGCTGGCTCTTCTGCTC |
| Full CAR | | CACGCCGCTCGGCCCCAAGTGCAACTCGTCGAATCCGGTGGAGGTCTG |
| | | GTCCAACCTGGTAGAAGCCTGAGACTGTCGTGTGCGGCCAGCGGATTC |
| | | ACCTTTGATGACTATGCTATGCACTGGGTGCGGCAGGCCCCAGGAAAG |
| | | GGCCTGGAATGGGTGTCGGGAATTAGCTGGAACTCCGGGTCCATTGGC |
| | | TACGCCGACTCCGTGAAGGGCCGCTTCACCATCTCCCGCGACAACGCA |
| | | AAGAACTCCCTGTACTTGCAAATGAACTCGCTCAGGGCTGAGGATACC |
| | | GCGCTGTACTACTGCTCCGTGCATTCCTTCCTGGCCTACTGGGGACAG |
| | | GGAACTCTGGTCACCGTGTCGAGCGCCTCCGGCGGCGGGGGCTCGGGT |
| | | GGACGGGCCTCGGGCGGAGGGGGGTCCGACATCGTGATGACCCAGACC |
| | | CCGCTGAGCTTGCCCGTGACTCCCGGAGAGCCTGCATCCATCTCCTGC |
| | | CGGTCATCCCAGTCCCTTCTCCACTCCAACGGATACAACTACCTCGAC |
| | | TGGTACCTCCAGAAGCCGGGACAGAGCCCTCAGCTTCTGATCTACCTG |
| | | GGGTCAAATAGAGCCTCAGGAGTGCCGGATCGGTTCAGCGGATCTGGT |
| | | TCGGGAACTGATTTCACTCTGAAGATTTCCCGCGTGGAAGCCGAGGAC |
| | | GTGGGCGTCTACTACTGTATGCAGGCGCTGCAGACCCCCTATACCTTC |
| | | GGCCAAGGGACGAAAGTGGAGATCAAGACCACTACCCCAGCACCGAGG |
| | | CCACCCACCCCGGCTCCTACCATCGCCTCCCAGCCTCTGTCCCTGCGT |
| | | CCGGAGGCATGTAGACCCGCAGCTGGTGGGGCCGTGCATACCCGGGGT |
| | | CTTGACTTCGCCTGCGATATCTACATTTGGGCCCCTCTGGCTGGTACT |
| | | TGCGGGGTCCTGCTGCTTTCACTCGTGATCACTCTTTACTGTAAGCGC |
| | | GGTCGGAAGAAGCTGCTGTACATCTTTAAGCAACCCTTCATGAGGCCT |
| | | GTGCAGACTACTCAAGAGGAGGACGGCTGTTCATGCCGGTTCCCAGAG |
| | | GAGGAGGAAGGCGGCTGCGAACTGCGCGTGAAATTCAGCCGCAGCGCA |
| | | GATGCTCCAGCCTACAAGCAGGGGCAGAACCAGCTCTACAACGAACTC |
| | | AATCTTGGTCGGAGAGAGGAGTACGACGTGCTGGACAAGCGGAGAGGA |
| | | CGGGACCCAGAAATGGGCGGGAAGCCGCGCAGAAAGAATCCCCAAGAG |
| | | GGCCTGTACAACGAGCTCCAAAAGGATAAGATGGCAGAAGCCTATAGC |
| | | GAGATTGGTATGAAAGGGGAACGCAGAAGAGGCAAAGGCCACGACGGA |
| | | CTGTACCAGGGACTCAGCACCGCCACCAAGGACACCTATGACGCTCTT |
| | | CACATGCAGGCCCTGCCGCCTCGG |

139111

| | | |
|---|---|---|
| 139111-aa | 985 | EVQLLESGGGLVQPGGSLRLSCAVSGFALSNHGMSWVRRAPGKGLEWV |
| ScFv domain | | SGIVYSGSTYYAASVKGRFTISRDNSRNTLYLQMNSLRPEDTAIYYCS |
| | | AHGGESDVWGQGTTVTVSSASGGGGSGGRASGGGGSDIVMTQTPLSLS |
| | | VTPGQPASISCKSSQSLLRNDGKTPLYWYLQKAGQPPQLLIYEVSNRF |
| | | SGVPDRFSGSGSGTDFTLKISRVEAEDVGAYYCMQNIQFPSFGGGTKL |
| | | EIK |
| 139111-nt | 986 | GAAGTGCAATTGTTGGAATCTGGAGGAGGACTTGTGCAGCCTGGAGGA |
| ScFv domain | | TCACTGAGACTTTCGTGTGCGGTGTCAGGCTTCGCCCTGAGCAACCAC |
| | | GGCATGAGCTGGGTGCGGAGAGCCCCGGGGAAGGGTCTGGAATGGGTG |
| | | TCCGGGATCGTCTACTCCGGTTCAACTTACTACGCCGCAAGCGTGAAG |
| | | GGTCGCTTCACCATTTCCCGCGATAACTCCCGGAACACCCTGTACCTC |
| | | CAAATGAACTCCCTGCGGCCCGAGGACACCGCCATCTACTACTGTTCC |
| | | GCGCATGGAGGAGAGTCCGATGTCTGGGGACAGGGCACTACCGTGACC |
| | | GTGTCGAGCGCCTCGGGGGGAGGAGGCTCCGGCGGTCGCGCCTCCGGG |
| | | GGGGGTGGCAGCGACATTGTGATGACGCAGACTCCACTCTCGCTGTCC |
| | | GTGACCCCGGGACAGCCCGCGTCCATCTCGTGCAAGAGCTCCCAGAGC |
| | | CTGCTGAGGAACGACGGAAAGACTCCTCTGTATTGGTACCTCCAGAAG |
| | | GCTGGACAGCCCCCGCAACTGCTCATCTACGAAGTGTCAAATCGCTTC |
| | | TCCGGGGTGCCGGATCGGTTTTCCGGCTCGGGATCGGGCACCGACTTC |
| | | ACCCTGAAAATCTCCAGGGTCGAGGCCGAGGACGTGGGAGCCTACTAC |
| | | TGCATGCAAAACATCCAGTTCCCTTCCTTCGGCGGCGGCACAAAGCTG |
| | | GAGATTAAG |
| 139111-aa | 987 | EVQLLESGGGLVQPGGSLRLSCAVSGFALSNHGMSWVRRAPGKGLEWV |
| VH | | SGIVYSGSTYYAASVKGRFTISRDNSRNTLYLQMNSLRPEDTAIYYCS |
| | | AHGGESDVWGQGTTVTVSS |
| 139111-aa | 988 | DIVMTQTPLSLSVTPGQPASISCKSSQSLLRNDGKTPLYWYLQKAGQP |
| VL | | PQLLIYEVSNRFSGVPDRFSGSGSGTDFTLKISRVEAEDVGAYYCMQN |
| | | IQFPSFGGGTKLEIK |
| 139111-aa | 989 | MALPVTALLLPLALLLHAARPEVQLLESGGGLVQPGGSLRLSCAVSGF |
| Full CAR | | ALSNHGMSWVRRAPGKGLEWVSGIVYSGSTYYAASVKGRFTISRDNSR |
| | | NTLYLQMNSLRPEDTAIYYCSAHGGESDVWGQGTTVTVSSASGGGGSG |
| | | GRASGGGGSDIVMTQTPLSLSVTPGQPASISCKSSQSLLRNDGKTPLY |
| | | WYLQKAGQPPQLLIYEVSNRFSGVPDRFSGSGSGTDFTLKISRVEAED |
| | | VGAYYCMQNIQFPSFGGGTKLEIKTTTPAPRPPTPAPTIASQPLSLRP |
| | | EACRPAAGGAVHTRGLDFACDIYIWAPLAGTCGVLLLSLVITLYCKRG |
| | | RKKLLYIFKQPFMRPVQTTQEEDGCSCRFPEEEEGGCELRVKFSRSAD |
| | | APAYKQGQNQLYNELNLGRREEYDVLDKRRGRDPEMGGKPRRKNPQEG |
| | | LYNELQKDKMAEAYSEIGMKGERRRGKGHDGLYQGLSTATKDTYDALH |
| | | MQALPPR |
| 139111-nt | 990 | ATGGCCCTCCCTGTCACCGCCCTGCTGCTTCCGCTGGCTCTTCTGCTC |
| Full CAR | | CACGCCGCTCGGCCCGAAGTGCAATTGTTGGAATCTGGAGGAGGACTT |
| | | GTGCAGCCTGGAGGATCACTGAGACTTTCGTGTGCGGTGTCAGGCTTC |
| | | GCCCTGAGCAACCACGGCATGAGCTGGGTGCGGAGAGCCCCGGGGAAG |
| | | GGTCTGGAATGGGTGTCCGGGATCGTCTACTCCGGTTCAACTTACTAC |
| | | GCCGCAAGCGTGAAGGGTCGCTTCACCATTTCCCGCGATAACTCCCGG |
| | | AACACCCTGTACCTCCAAATGAACTCCCTGCGGCCCGAGGACACCGCC |
| | | ATCTACTACTGTTCCGCGCATGGAGGAGAGTCCGATGTCTGGGGACAG |
| | | GGCACTACCGTGACCGTGTCGAGCGCCTCGGGGGGAGGAGGCTCCGGC |
| | | GGTCGCGCCTCCGGGGGGGGTGGCAGCGACATTGTGATGACGCAGACT |
| | | CCACTCTCGCTGTCCGTGACCCCGGGACAGCCCGCGTCCATCTCGTGC |
| | | AAGAGCTCCCAGAGCCTGCTGAGGAACGACGGAAAGACTCCTCTGTAT |
| | | TGGTACCTCCAGAAGGCTGGACAGCCCCCGCAACTGCTCATCTACGAA |
| | | GTGTCAAATCGCTTCTCCGGGGTGCCGGATCGGTTTTCCGGCTCGGGA |
| | | TCGGGCACCGACTTCACCCTGAAAATCTCCAGGGTCGAGGCCGAGGAC |
| | | GTGGGAGCCTACTACTGCATGCAAAACATCCAGTTCCCTTCCTTCGGC |
| | | GGCGGCACAAAGCTGGAGATTAAGACCACTACCCCAGCACCGAGGCCA |
| | | CCCACCCCGGCTCCTACCATCGCCTCCCAGCCTCTGTCCCTGCGTCCG |
| | | GAGGCATGTAGACCCGCAGCTGGTGGGGCCGTGCATACCCGGGGTCTT |
| | | GACTTCGCCTGCGATATCTACATTTGGGCCCCTCTGGCTGGTACTTGC |
| | | GGGGTCCTGCTGCTTTCACTCGTGATCACTCTTTACTGTAAGCGCGGT |
| | | CGGAAGAAGCTGCTGTACATCTTTAAGCAACCCTTCATGAGGCCTGTG |
| | | CAGACTACTCAAGAGGAGGACGGCTGTTCATGCCGGTTCCCAGAGGAG |
| | | GAGGAAGGCGGCTGCGAACTGCGCGTGAAATTCAGCCGCAGCGCAGAT |
| | | GCTCCAGCCTACAAGCAGGGGCAGAACCAGCTCTACAACGAACTCAAT |
| | | CTTGGTCGGAGAGAGGAGTACGACGTGCTGGACAAGCGGAGAGGACGG |
| | | GACCCAGAAATGGGCGGGAAGCCGCGCAGAAAGAATCCCCAAGAGGGC |
| | | CTGTACAACGAGCTCCAAAAGGATAAGATGGCAGAAGCCTATAGCGAG |
| | | ATTGGTATGAAAGGGGAACGCAGAAGAGGCAAAGGCCACGACGGACTG |
| | | TACCAGGGACTCAGCACCGCCACCAAGGACACCTATGACGCTCTTCAC |
| | | ATGCAGGCCCTGCCGCCTCGG |

139100

| | | |
|---|---|---|
| 139100-aa | 991 | QVQLVQSGAEVRKTGASVKVSCKASGYIFDNFGINWVRQAPGQGLEWM |
| ScFv domain | | GWINPKNNNTNYAQKFQGRVTITADESTNTAYMEVSSLRSEDTAVYYC |
| | | ARGPYYYQSYMDVWGQGTMVTVSSASGGGGSGGRASGGGGSDIVMTQT |
| | | PLSLPVTPGEPASISCRSSQSLLHSNGYNYLNWYLQKPGQSPQLLIYL |
| | | GSKRASGVPDRFSGSGSGTDFTLHITRVGAEDVGVYYCMQALQTPYTF |
| | | GQGTKLEIK |
| 139100-nt | 992 | CAAGTCCAACTCGTCCAGTCCGGCGCAGAAGTCAGAAAAACCGGTGCT |
| ScFv domain | | AGCGTGAAAGTGTCCTGCAAGGCCTCCGGCTACATTTTCGATAACTTC |
| | | GGAATCAACTGGGTCAGACAGGCCCCGGGCCAGGGGCTGGAATGGATG |
| | | GGATGGATCAACCCCAAGAACAACAACACCAACTACGCACAGAAGTTC |
| | | CAGGGCCGCGTGACTATCACCGCCGATGAATCGACCAATACCGCCTAC |
| | | ATGGAGGTGTCCTCCCTGCGGTCGGAGGACACTGCCGTGTATTACTGC |
| | | GCGAGGGGCCCATACTACTACCAAAGCTACATGGACGTCTGGGGACAG |
| | | GGAACCATGGTGACCGTGTCATCCGCCTCCGGTGGTGGAGGCTCCGGG |
| | | GGGCGGGCTTCAGGAGGCGGAGGAAGCGATATTGTGATGACCCAGACT |
| | | CCGCTTAGCCTGCCCGTGACTCCTGGAGAACCGGCCTCCATTTCCTGC |
| | | CGGTCCTCGCAATCACTCCTGCATTCCAACGGTTACAACTACCTGAAT |
| | | TGGTACCTCCAGAAGCCTGGCCAGTCGCCCCAGTTGCTGATCTATCTG |
| | | GGCTCGAAGCGCGCCTCCGGGGTGCCTGACCGGTTTAGCGGATCTGGG |
| | | AGCGGCACGGACTTCACTCTCCACATCACCCGCGTGGGAGCGGAGGAC |
| | | GTGGGAGTGTACTACTGTATGCAGGCGCTGCAGACTCCGTACACATTC |
| | | GGACAGGGCACCAAGCTGGAGATCAAG |
| 139100-aa | 993 | QVQLVQSGAEVRKTGASVKVSCKASGYIFDNFGINWVRQAPGQGLEWM |
| VH | | GWINPKNNNTNYAQKFQGRVTITADESTNTAYMEVSSLRSEDTAVYYC |
| | | ARGPYYYQSYMDVWGQGTMVTVSS |
| 139100-aa | 994 | DIVMTQTPLSLPVTPGEPASISCRSSQSLLHSNGYNYLNWYLQKPGQS |
| VL | | PQLLIYLGSKRASGVPDRFSGSGSGTDFTLHITRVGAEDVGVYYCMQA |
| | | LQTPYTFGQGTKLEIK |
| 139100-aa | 995 | MALPVTALLLPLALLLHAARPQVQLVQSGAEVRKTGASVKVSCKASGY |
| Full CAR | | IFDNFGINWVRQAPGQGLEWMGWINPKNNNTNYAQKFQGRVTITADES |
| | | TNTAYMEVSSLRSEDTAVYYCARGPYYYQSYMDVWGQGTMVTVSSASG |
| | | GGGSGGRASGGGGSDIVMTQTPLSLPVTPGEPASISCRSSQSLLHSNG |
| | | YNYLNWYLQKPGQSPQLLIYLGSKRASGVPDRFSGSGSGTDFTLHITR |
| | | VGAEDVGVYYCMQALQTPYTFGQGTKLEIKTTTPAPRPPTPAPTIASQ |
| | | PLSLRPEACRPAAGGAVHTRGLDFACDIYIWAPLAGTCGVLLLSLVIT |
| | | LYCKRGRKKLLYIFKQPFMRPVQTTQEEDGCSCRFPEEEEGGCELRVK |
| | | FSRSADAPAYKQGQNQLYNELNLGRREEYDVLDKRRGRDPEMGGKPRR |
| | | KNPQEGLYNELQKDKMAEAYSEIGMKGERRRGKGHDGLYQGLSTATKD |
| | | TYDALHMQALPPR |
| 139100-nt | 996 | ATGGCCCTCCCTGTCACCGCCCTGCTGCTTCCGCTGGCTCTTCTGCTC |
| Full CAR | | CACGCCGCTCGGCCCCAAGTCCAACTCGTCCAGTCCGGCGCAGAAGTC |
| | | AGAAAAACCGGTGCTAGCGTGAAAGTGTCCTGCAAGGCCTCCGGCTAC |
| | | ATTTTCGATAACTTCGGAATCAACTGGGTCAGACAGGCCCCGGGCCAG |
| | | GGGCTGGAATGGATGGGATGGATCAACCCCAAGAACAACAACACCAAC |
| | | TACGCACAGAAGTTCCAGGGCCGCGTGACTATCACCGCCGATGAATCG |
| | | ACCAATACCGCCTACATGGAGGTGTCCTCCCTGCGGTCGGAGGACACT |
| | | GCCGTGTATTACTGCGCGAGGGGCCCATACTACTACCAAAGCTACATG |
| | | GACGTCTGGGGACAGGGAACCATGGTGACCGTGTCATCCGCCTCCGGT |
| | | GGTGGAGGCTCCGGGGGGCGGGCTTCAGGAGGCGGAGGAAGCGATATT |
| | | GTGATGACCCAGACTCCGCTTAGCCTGCCCGTGACTCCTGGAGAACCG |
| | | GCCTCCATTTCCTGCCGGTCCTCGCAATCACTCCTGCATTCCAACGGT |
| | | TACAACTACCTGAATTGGTACCTCCAGAAGCCTGGCCAGTCGCCCCAG |
| | | TTGCTGATCTATCTGGGCTCGAAGCGCGCCTCCGGGGTGCCTGACCGG |
| | | TTTAGCGGATCTGGGAGCGGCACGGACTTCACTCTCCACATCACCCGC |
| | | GTGGGAGCGGAGGACGTGGGAGTGTACTACTGTATGCAGGCGCTGCAG |
| | | ACTCCGTACACATTCGGACAGGGCACCAAGCTGGAGATCAAGACCACT |
| | | ACCCCAGCACCGAGGCCACCCACCCCGGCTCCTACCATCGCCTCCCAG |
| | | CCTCTGTCCCTGCGTCCGGAGGCATGTAGACCCGCAGCTGGTGGGGCC |
| | | GTGCATACCCGGGGTCTTGACTTCGCCTGCGATATCTACATTTGGGCC |
| | | CCTCTGGCTGGTACTTGCGGGGTCCTGCTGCTTTCACTCGTGATCACT |
| | | CTTTACTGTAAGCGCGGTCGGAAGAAGCTGCTGTACATCTTTAAGCAA |
| | | CCCTTCATGAGGCCTGTGCAGACTACTCAAGAGGAGGACGGCTGTTCA |
| | | TGCCGGTTCCCAGAGGAGGAGGAAGGCGGCTGCGAACTGCGCGTGAAA |
| | | TTCAGCCGCAGCGCAGATGCTCCAGCCTACAAGCAGGGGCAGAACCAG |
| | | CTCTACAACGAACTCAATCTTGGTCGGAGAGAGGAGTACGACGTGCTG |
| | | GACAAGCGGAGAGGACGGGACCCAGAAATGGGCGGGAAGCCGCGCAGA |
| | | AAGAATCCCCAAGAGGGCCTGTACAACGAGCTCCAAAAGGATAAGATG |
| | | GCAGAAGCCTATAGCGAGATTGGTATGAAAGGGGAACGCAGAAGAGGC |
| | | AAAGGCCACGACGGACTGTACCAGGGACTCAGCACCGCCACCAAGGAC |
| | | ACCTATGACGCTCTTCACATGCAGGCCCTGCCGCCTCGG |

139101

| | | |
|---|---|---|
| 139101-aa | 997 | QVQLQESGGGLVQPGGSLRLSCAASGFTFSSDAMTWVRQAPGKGLEWV |
| ScFv domain | | SVISGSGGTTYYADSVKGRFTISRDNSKNTLYLQMNSLRAEDTAVYYC |
| | | AKLDSSGYYYARGPRYWGQGTLVTVSSASGGGGSGGRASGGGGSDIQL |
| | | TQSPSSLSASVGDRVTITCRASQSISSYLNWYQQKPGKAPKLLIYGAS |
| | | TLASGVPARFSGSGSGTHFTLTINSLQSEDSATYYCQQSYKRASFGQG |
| | | TKVEIK |
| 139101-nt | 998 | CAAGTGCAACTTCAAGAATCAGGCGGAGGACTCGTGCAGCCCGGAGGA |
| ScFv domain | | TCATTGCGGCTCTCGTGCGCCGCCTCGGGCTTCACCTTCTCGAGCGAC |
| | | GCCATGACCTGGGTCCGCCAGGCCCCGGGGAAGGGGCTGGAATGGGTG |
| | | TCTGTGATTTCCGGCTCCGGGGGAACTACGTACTACGCCGATTCCGTG |
| | | AAAGGTCGCTTCACTATCTCCCGGGACAACAGCAAGAACACCCTTTAT |
| | | CTGCAAATGAATTCCCTCCGCGCCGAGGACACCGCCGTGTACTACTGC |
| | | GCCAAGCTGGACTCCTCGGGCTACTACTATGCCCGGGGTCCGAGATAC |
| | | TGGGGACAGGGAACCCTCGTGACCGTGTCCTCCGCGTCCGGCGGAGGA |
| | | GGGTCGGGAGGGCGGGCCTCCGGCGGCGGCGGTTCGGACATCCAGCTG |
| | | ACCCAGTCCCCATCCTCACTGAGCGCAAGCGTGGGCGACAGAGTCACC |
| | | ATTACATGCAGGGCGTCCCAGAGCATCAGCTCCTACCTGAACTGGTAC |
| | | CAACAGAAGCCTGGAAAGGCTCCTAAGCTGTTGATCTACGGGGCTTCG |
| | | ACCCTGGCATCCGGGGTGCCCGCGAGGTTTAGCGGAAGCGGTAGCGGC |
| | | ACTCACTTCACTCTGACCATTAACAGCCTCCAGTCCGAGGATTCAGCC |
| | | ACTTACTACTGTCAGCAGTCCTACAAGCGGGCCAGCTTCGGACAGGGC |
| | | ACTAAGGTCGAGATCAAG |
| 139101-aa | 999 | QVQLQESGGGLVQPGGSLRLSCAASGFTFSSDAMTWVRQAPGKGLEWV |
| VH | | SVISGSGGTTYYADSVKGRFTISRDNSKNTLYLQMNSLRAEDTAVYYC |
| | | AKLDSSGYYYARGPRYWGQGTLVTVSS |
| 139101-aa | 1000 | DIQLTQSPSSLSASVGDRVTITCRASQSISSYLNWYQQKPGKAPKLLI |
| VL | | YGASTLASGVPARFSGSGSGTHFTLTINSLQSEDSATYYCQQSYKRAS |
| | | FGQGTKVEIK |
| 139101-aa | 1001 | MALPVTALLLPLALLLHAARPQVQLQESGGGLVQPGGSLRLSCAASGF |
| Full CAR | | TFSSDAMTWVRQAPGKGLEWVSVISGSGGTTYYADSVKGRFTISRDNS |
| | | KNTLYLQMNSLRAEDTAVYYCAKLDSSGYYYARGPRYWGQGTLVTVSS |
| | | ASGGGGSGGRASGGGGSDIQLTQSPSSLSASVGDRVTITCRASQSISS |
| | | YLNWYQQKPGKAPKLLIYGASTLASGVPARFSGSGSGTHFTLTINSLQ |
| | | SEDSATYYCQQSYKRASFGQGTKVEIKTTTPAPRPPTPAPTIASQPLS |
| | | LRPEACRPAAGGAVHTRGLDFACDIYIWAPLAGTCGVLLLSLVITLYC |
| | | KRGRKKLLYIFKQPFMRPVQTTQEEDGCSCRFPEEEEGGCELRVKFSR |
| | | SADAPAYKQGQNQLYNELNLGRREEYDVLDKRRGRDPEMGGKPRRKNP |
| | | QEGLYNELQKDKMAEAYSEIGMKGERRRGKGHDGLYQGLSTATKDTYD |
| | | ALHMQALPPR |
| 139101-nt | 1002 | ATGGCCCTCCCTGTCACCGCCCTGCTGCTTCCGCTGGCTCTTCTGCTC |
| Full CAR | | CACGCCGCTCGGCCCCAAGTGCAACTTCAAGAATCAGGCGGAGGACTC |
| | | GTGCAGCCCGGAGGATCATTGCGGCTCTCGTGCGCCGCCTCGGGCTTC |
| | | ACCTTCTCGAGCGACGCCATGACCTGGGTCCGCCAGGCCCCGGGGAAG |
| | | GGGCTGGAATGGGTGTCTGTGATTTCCGGCTCCGGGGGAACTACGTAC |
| | | TACGCCGATTCCGTGAAAGGTCGCTTCACTATCTCCCGGGACAACAGC |
| | | AAGAACACCCTTTATCTGCAAATGAATTCCCTCCGCGCCGAGGACACC |
| | | GCCGTGTACTACTGCGCCAAGCTGGACTCCTCGGGCTACTACTATGCC |
| | | CGGGGTCCGAGATACTGGGGACAGGGAACCCTCGTGACCGTGTCCTCC |
| | | GCGTCCGGCGGAGGAGGGTCGGGAGGGCGGGCCTCCGGCGGCGGCGGT |
| | | TCGGACATCCAGCTGACCCAGTCCCCATCCTCACTGAGCGCAAGCGTG |
| | | GGCGACAGAGTCACCATTACATGCAGGGCGTCCCAGAGCATCAGCTCC |
| | | TACCTGAACTGGTACCAACAGAAGCCTGGAAAGGCTCCTAAGCTGTTG |
| | | ATCTACGGGGCTTCGACCCTGGCATCCGGGGTGCCCGCGAGGTTTAGC |
| | | GGAAGCGGTAGCGGCACTCACTTCACTCTGACCATTAACAGCCTCCAG |
| | | TCCGAGGATTCAGCCACTTACTACTGTCAGCAGTCCTACAAGCGGGCC |
| | | AGCTTCGGACAGGGCACTAAGGTCGAGATCAAGACCACTACCCCAGCA |
| | | CCGAGGCCACCCACCCCGGCTCCTACCATCGCCTCCCAGCCTCTGTCC |
| | | CTGCGTCCGGAGGCATGTAGACCCGCAGCTGGTGGGGCCGTGCATACC |
| | | CGGGGTCTTGACTTCGCCTGCGATATCTACATTTGGGCCCCTCTGGCT |
| | | GGTACTTGCGGGGTCCTGCTGCTTTCACTCGTGATCACTCTTTACTGT |
| | | AAGCGCGGTCGGAAGAAGCTGCTGTACATCTTTAAGCAACCCTTCATG |
| | | AGGCCTGTGCAGACTACTCAAGAGGAGGACGGCTGTTCATGCCGGTTC |
| | | CCAGAGGAGGAGGAAGGCGGCTGCGAACTGCGCGTGAAATTCAGCCGC |
| | | AGCGCAGATGCTCCAGCCTACAAGCAGGGGCAGAACCAGCTCTACAAC |
| | | GAACTCAATCTTGGTCGGAGAGAGGAGTACGACGTGCTGGACAAGCGG |
| | | AGAGGACGGGACCCAGAAATGGGCGGGAAGCCGCGCAGAAAGAATCCC |
| | | CAAGAGGGCCTGTACAACGAGCTCCAAAAGGATAAGATGGCAGAAGCC |
| | | TATAGCGAGATTGGTATGAAAGGGGAACGCAGAAGAGGCAAAGGCCAC |
| | | GACGGACTGTACCAGGGACTCAGCACCGCCACCAAGGACACCTATGAC |
| | | GCTCTTCACATGCAGGCCCTGCCGCCTCGG |

139102

| | | |
|---|---|---|
| 139102-aa | 1003 | QVQLVQSGAEVKKPGASVKVSCKASGYTFSNYGITWVRQAPGQGLEWM |
| ScFv domain | | GWISAYNGNTNYAQKFQGRVTMTRNTSISTAYMELSSLRSEDTAVYYC |
| | | ARGPYYYYMDVWGKGTMVTVSSASGGGGSGGRASGGGGSEIVMTQSPL |
| | | SLPVTPGEPASISCRSSQSLLYSNGYNYVDWYLQKPGQSPQLLIYLGS |
| | | NRASGVPDRFSGSGSGTDFKLQISRVEAEDVGIYYCMQGRQFPYSFGQ |
| | | GTKVEIK |
| 139102-nt | 1004 | CAAGTCCAACTGGTCCAGAGCGGTGCAGAAGTGAAGAAGCCCGGAGCG |
| ScFv domain | | AGCGTGAAAGTGTCCTGCAAGGCTTCCGGGTACACCTTCTCCAACTAC |
| | | GGCATCACTTGGGTGCGCCAGGCCCCGGGACAGGGCCTGGAATGGATG |
| | | GGGTGGATTTCCGCGTACAACGGCAATACGAACTACGCTCAGAAGTTC |
| | | CAGGGTAGAGTGACCATGACTAGGAACACCTCCATTTCCACCGCCTAC |
| | | ATGGAACTGTCCTCCCTGCGGAGCGAGGACACCGCCGTGTACTATTGC |
| | | GCCCGGGGACCATACTACTACTACATGGATGTCTGGGGGAAGGGGACT |
| | | ATGGTCACCGTGTCATCCGCCTCGGGAGGCGGCGGATCAGGAGGACGC |
| | | GCCTCTGGTGGTGGAGGATCGGAGATCGTGATGACCCAGAGCCCTCTC |
| | | TCCTTGCCCGTGACTCCTGGGGAGCCCGCATCCATTTCATGCCGGAGC |
| | | TCCCAGTCACTTCTCTACTCCAACGGCTATAACTACGTGGATTGGTAC |
| | | CTCCAAAAGCCGGGCCAGAGCCCGCAGCTGCTGATCTACCTGGGCTCG |
| | | AACAGGGCCAGCGGAGTGCCTGACCGGTTCTCCGGGTCGGGAAGCGGG |
| | | ACCGACTTCAAGCTGCAAATCTCGAGAGTGGAGGCCGAGGACGTGGGA |
| | | ATCTACTACTGTATGCAGGGCCGCCAGTTTCCGTACTCGTTCGGACAG |
| | | GGCACCAAAGTGGAAATCAAG |
| 139102-aa | 1005 | QVQLVQSGAEVKKPGASVKVSCKASGYTFSNYGITWVRQAPGQGLEWM |
| VH | | GWISAYNGNTNYAQKFQGRVTMTRNTSISTAYMELSSLRSEDTAVYYC |
| | | ARGPYYYYMDVWGKGTMVTVSS |
| 139102-aa | 1006 | EIVMTQSPLSLPVTPGEPASISCRSSQSLLYSNGYNYVDWYLQKPGQS |
| VL | | PQLLIYLGSNRASGVPDRFSGSGSGTDFKLQISRVEAEDVGIYYCMQG |
| | | RQFPYSFGQGTKVEIK |
| 139102-aa | 1007 | MALPVTALLLPLALLLHAARPQVQLVQSGAEVKKPGASVKVSCKASGY |
| Full CAR | | TFSNYGITWVRQAPGQGLEWMGWISAYNGNTNYAQKFQGRVTMTRNTS |
| | | ISTAYMELSSLRSEDTAVYYCARGPYYYYMDVWGKGTMVTVSSASGGG |
| | | GSGGRASGGGGSEIVMTQSPLSLPVTPGEPASISCRSSQSLLYSNGYN |
| | | YVDWYLQKPGQSPQLLIYLGSNRASGVPDRFSGSGSGTDFKLQISRVE |
| | | AEDVGIYYCMQGRQFPYSFGQGTKVEIKTTTPAPRPPTPAPTIASQPL |
| | | SLRPEACRPAAGGAVHTRGLDFACDIYIWAPLAGTCGVLLLSLVITLY |
| | | CKRGRKKLLYIFKQPFMRPVQTTQEEDGCSCRFPEEEEGGCELRVKFS |
| | | RSADAPAYKQGQNQLYNELNLGRREEYDVLDKRRGRDPEMGGKPRRKN |
| | | PQEGLYNELQKDKMAEAYSEIGMKGERRRGKGHDGLYQGLSTATKDTY |
| | | DALHMQALPPR |
| 139102-nt | 1008 | ATGGCCCTCCCTGTCACCGCCCTGCTGCTTCCGCTGGCTCTTCTGCTC |
| Full CAR | | CACGCCGCTCGGCCCCAAGTCCAACTGGTCCAGAGCGGTGCAGAAGTG |
| | | AAGAAGCCCGGAGCGAGCGTGAAAGTGTCCTGCAAGGCTTCCGGGTAC |
| | | ACCTTCTCCAACTACGGCATCACTTGGGTGCGCCAGGCCCCGGGACAG |
| | | GGCCTGGAATGGATGGGGTGGATTTCCGCGTACAACGGCAATACGAAC |
| | | TACGCTCAGAAGTTCCAGGGTAGAGTGACCATGACTAGGAACACCTCC |
| | | ATTTCCACCGCCTACATGGAACTGTCCTCCCTGCGGAGCGAGGACACC |
| | | GCCGTGTACTATTGCGCCCGGGGACCATACTACTACTACATGGATGTC |
| | | TGGGGGAAGGGGACTATGGTCACCGTGTCATCCGCCTCGGGAGGCGGC |
| | | GGATCAGGAGGACGCGCCTCTGGTGGTGGAGGATCGGAGATCGTGATG |
| | | ACCCAGAGCCCTCTCTCCTTGCCCGTGACTCCTGGGGAGCCCGCATCC |
| | | ATTTCATGCCGGAGCTCCCAGTCACTTCTCTACTCCAACGGCTATAAC |
| | | TACGTGGATTGGTACCTCCAAAAGCCGGGCCAGAGCCCGCAGCTGCTG |
| | | ATCTACCTGGGCTCGAACAGGGCCAGCGGAGTGCCTGACCGGTTCTCC |
| | | GGGTCGGGAAGCGGGACCGACTTCAAGCTGCAAATCTCGAGAGTGGAG |
| | | GCCGAGGACGTGGGAATCTACTACTGTATGCAGGGCCGCCAGTTTCCG |
| | | TACTCGTTCGGACAGGGCACCAAAGTGGAAATCAAGACCACTACCCCA |
| | | GCACCGAGGCCACCCACCCCGGCTCCTACCATCGCCTCCCAGCCTCTG |
| | | TCCCTGCGTCCGGAGGCATGTAGACCCGCAGCTGGTGGGGCCGTGCAT |
| | | ACCCGGGGTCTTGACTTCGCCTGCGATATCTACATTTGGGCCCCTCTG |
| | | GCTGGTACTTGCGGGGTCCTGCTGCTTTCACTCGTGATCACTCTTTAC |
| | | TGTAAGCGCGGTCGGAAGAAGCTGCTGTACATCTTTAAGCAACCCTTC |
| | | ATGAGGCCTGTGCAGACTACTCAAGAGGAGGACGGCTGTTCATGCCGG |
| | | TTCCCAGAGGAGGAGGAAGGCGGCTGCGAACTGCGCGTGAAATTCAGC |
| | | CGCAGCGCAGATGCTCCAGCCTACAAGCAGGGGCAGAACCAGCTCTAC |
| | | AACGAACTCAATCTTGGTCGGAGAGAGGAGTACGACGTGCTGGACAAG |
| | | CGGAGAGGACGGGACCCAGAAATGGGCGGGAAGCCGCGCAGAAAGAAT |
| | | CCCCAAGAGGGCCTGTACAACGAGCTCCAAAAGGATAAGATGGCAGAA |
| | | GCCTATAGCGAGATTGGTATGAAAGGGGAACGCAGAAGAGGCAAAGGC |
| | | CACGACGGACTGTACCAGGGACTCAGCACCGCCACCAAGGACACCTAT |
| | | GACGCTCTTCACATGCAGGCCCTGCCGCCTCGG |

139104

| | | |
|---|---|---|
| 139104-aa | 1009 | EVQLLETGGGLVQPGGSLRLSCAVSGFALSNHGMSWVRRAPGKGLEWV |
| ScFv domain | | SGIVYSGSTYYAASVKGRFTISRDNSRNTLYLQMNSLRPEDTAIYYCS |
| | | AHGGESDVWGQGTTVTVSSASGGGGSGGRASGGGGSEIVLTQSPATLS |
| | | VSPGESATLSCRASQSVSSNLAWYQQKPGQAPRLLIYGASTRASGIPD |
| | | RFSGSGSGTDFTLTISSLQAEDVAVYYCQQYGSSLTFGGGTKVEIK |
| 139104-nt | 1010 | GAAGTGCAATTGCTCGAAACTGGAGGAGGTCTGGTGCAACCTGGAGGA |
| ScFv domain | | TCACTTCGCCTGTCCTGCGCCGTGTCGGGCTTTGCCCTGTCCAACCAT |
| | | GGAATGAGCTGGGTCCGCCGCGCGCCGGGGAAGGGCCTCGAATGGGTG |
| | | TCCGGCATCGTCTACTCCGGCTCCACCTACTACGCCGCGTCCGTGAAG |
| | | GGCCGGTTCACGATTTCACGGGACAACTCGCGGAACACCCTGTACCTC |
| | | CAAATGAATTCCCTTCGGCCGGAGGATACTGCCATCTACTACTGCTCC |
| | | GCCCACGGTGGCGAATCCGACGTCTGGGGCCAGGGAACCACCGTGACC |
| | | GTGTCCAGCGCGTCCGGGGGAGGAGGAAGCGGGGGTAGAGCATCGGGT |
| | | GGAGGCGGATCAGAGATCGTGCTGACCCAGTCCCCCGCCACCTTGAGC |
| | | GTGTCACCAGGAGAGTCCGCCACCCTGTCATGCCGCGCCAGCCAGTCC |
| | | GTGTCCTCCAACCTGGCTTGGTACCAGCAGAAGCCGGGGCAGGCCCCT |
| | | AGACTCCTGATCTATGGGGCGTCGACCCGGGCATCTGGAATTCCCGAT |
| | | AGGTTCAGCGGATCGGGCTCGGGCACTGACTTCACTCTGACCATCTCC |
| | | TCGCTGCAAGCCGAGGACGTGGCTGTGTACTACTGTCAGCAGTACGGA |
| | | AGCTCCCTGACTTTCGGTGGCGGGACCAAAGTCGAGATTAAG |
| 139104-aa | 1011 | EVQLLETGGGLVQPGGSLRLSCAVSGFALSNHGMSWVRRAPGKGLEWV |
| VH | | SGIVYSGSTYYAASVKGRFTISRDNSRNTLYLQMNSLRPEDTAIYYCS |
| | | AHGGESDVWGQGTTVTVSS |
| 139104-aa | 1012 | EIVLTQSPATLSVSPGESATLSCRASQSVSSNLAWYQQKPGQAPRLLI |
| VL | | YGASTRASGIPDRFSGSGSGTDFTLTISSLQAEDVAVYYCQQYGSSLT |
| | | FGGGTKVEIK |
| 139104-aa | 1013 | MALPVTALLLPLALLLHAARPEVQLLETGGGLVQPGGSLRLSCAVSGF |
| Full CAR | | ALSNHGMSWVRRAPGKGLEWVSGIVYSGSTYYAASVKGRFTISRDNSR |
| | | NTLYLQMNSLRPEDTAIYYCSAHGGESDVWGQGTTVTVSSASGGGGSG |
| | | GRASGGGGSEIVLTQSPATLSVSPGESATLSCRASQSVSSNLAWYQQK |
| | | PGQAPRLLIYGASTRASGIPDRFSGSGSGTDFTLTISSLQAEDVAVYY |
| | | CQQYGSSLTFGGGTKVEIKTTTPAPRPPTPAPTIASQPLSLRPEACRP |
| | | AAGGAVHTRGLDFACDIYIWAPLAGTCGVLLLSLVITLYCKRGRKKLL |
| | | YIFKQPFMRPVQTTQEEDGCSCRFPEEEEGGCELRVKFSRSADAPAYK |
| | | QGQNQLYNELNLGRREEYDVLDKRRGRDPEMGGKPRRKNPQEGLYNEL |
| | | QKDKMAEAYSEIGMKGERRRGKGHDGLYQGLSTATKDTYDALHMQALP |
| | | PR |
| 139104-nt | 1014 | ATGGCCCTCCCTGTCACCGCCCTGCTGCTTCCGCTGGCTCTTCTGCTC |
| Full CAR | | CACGCCGCTCGGCCCGAAGTGCAATTGCTCGAAACTGGAGGAGGTCTG |
| | | GTGCAACCTGGAGGATCACTTCGCCTGTCCTGCGCCGTGTCGGGCTTT |
| | | GCCCTGTCCAACCATGGAATGAGCTGGGTCCGCCGCGCGCCGGGGAAG |
| | | GGCCTCGAATGGGTGTCCGGCATCGTCTACTCCGGCTCCACCTACTAC |
| | | GCCGCGTCCGTGAAGGGCCGGTTCACGATTTCACGGGACAACTCGCGG |
| | | AACACCCTGTACCTCCAAATGAATTCCCTTCGGCCGGAGGATACTGCC |
| | | ATCTACTACTGCTCCGCCCACGGTGGCGAATCCGACGTCTGGGGCCAG |
| | | GGAACCACCGTGACCGTGTCCAGCGCGTCCGGGGGAGGAGGAAGCGGG |
| | | GGTAGAGCATCGGGTGGAGGCGGATCAGAGATCGTGCTGACCCAGTCC |
| | | CCCGCCACCTTGAGCGTGTCACCAGGAGAGTCCGCCACCCTGTCATGC |
| | | CGCGCCAGCCAGTCCGTGTCCTCCAACCTGGCTTGGTACCAGCAGAAG |
| | | CCGGGGCAGGCCCCTAGACTCCTGATCTATGGGGCGTCGACCCGGGCA |
| | | TCTGGAATTCCCGATAGGTTCAGCGGATCGGGCTCGGGCACTGACTTC |
| | | ACTCTGACCATCTCCTCGCTGCAAGCCGAGGACGTGGCTGTGTACTAC |
| | | TGTCAGCAGTACGGAAGCTCCCTGACTTTCGGTGGCGGGACCAAAGTC |
| | | GAGATTAAGACCACTACCCCAGCACCGAGGCCACCCACCCCGGCTCCT |
| | | ACCATCGCCTCCCAGCCTCTGTCCCTGCGTCCGGAGGCATGTAGACCC |
| | | GCAGCTGGTGGGGCCGTGCATACCCGGGGTCTTGACTTCGCCTGCGAT |
| | | ATCTACATTTGGGCCCCTCTGGCTGGTACTTGCGGGGTCCTGCTGCTT |
| | | TCACTCGTGATCACTCTTTACTGTAAGCGCGGTCGGAAGAAGCTGCTG |
| | | TACATCTTTAAGCAACCCTTCATGAGGCCTGTGCAGACTACTCAAGAG |
| | | GAGGACGGCTGTTCATGCCGGTTCCCAGAGGAGGAGGAAGGCGGCTGC |
| | | GAACTGCGCGTGAAATTCAGCCGCAGCGCAGATGCTCCAGCCTACAAG |
| | | CAGGGGCAGAACCAGCTCTACAACGAACTCAATCTTGGTCGGAGAGAG |
| | | GAGTACGACGTGCTGGACAAGCGGAGAGGACGGGACCCAGAAATGGGC |
| | | GGGAAGCCGCGCAGAAAGAATCCCCAAGAGGGCCTGTACAACGAGCTC |
| | | CAAAAGGATAAGATGGCAGAAGCCTATAGCGAGATTGGTATGAAAGGG |
| | | GAACGCAGAAGAGGCAAAGGCCACGACGGACTGTACCAGGGACTCAGC |
| | | ACCGCCACCAAGGACACCTATGACGCTCTTCACATGCAGGCCCTGCCG |
| | | CCTCGG |

139106

| | | |
|---|---|---|
| 139106-aa | 1015 | EVQLVETGGGLVQPGGSLRLSCAVSGFALSNHGMSWVRRAPGKGLEWV |
| ScFv domain | | SGIVYSGSTYYAASVKGRFTISRDNSRNTLYLQMNSLRPEDTAIYYCS |
| | | AHGGESDVWGQGTTVTVSSASGGGGSGGRASGGGGSEIVMTQSPATLS |
| | | VSPGERATLSCRASQSVSSKLAWYQQKPGQAPRLLMYGASIRATGIPD |
| | | RFSGSGSGTEFTLTISSLEPEDFAVYYCQQYGSSSWTFGQGTKVEIK |
| 139106-nt | 1016 | GAAGTGCAATTGGTGGAAACTGGAGGAGGACTTGTGCAACCTGGAGGA |
| ScFv domain | | TCATTGAGACTGAGCTGCGCAGTGTCGGGATTCGCCCTGAGCAACCAT |
| | | GGAATGTCCTGGGTCAGAAGGGCCCCTGGAAAAGGCCTCGAATGGGTG |
| | | TCAGGGATCGTGTACTCCGGTTCCACTTACTACGCCGCCTCCGTGAAG |
| | | GGGCGCTTCACTATCTCACGGGATAACTCCCGCAATACCCTGTACCTC |
| | | CAAATGAACAGCCTGCGGCCGGAGGATACCGCCATCTACTACTGTTCC |
| | | GCCCACGGTGGAGAGTCTGACGTCTGGGGCCAGGGAACTACCGTGACC |
| | | GTGTCCTCCGCGTCCGGCGGTGGAGGGAGCGGCGGCCGCGCCAGCGGC |
| | | GGCGGAGGCTCCGAGATCGTGATGACCCAGAGCCCCGCTACTCTGTCG |
| | | GTGTCGCCCGGAGAAAGGGCGACCCTGTCCTGCCGGGCGTCGCAGTCC |
| | | GTGAGCAGCAAGCTGGCTTGGTACCAGCAGAAGCCGGGCCAGGCACCA |
| | | CGCCTGCTTATGTACGGTGCCTCCATTCGGGCCACCGGAATCCCGGAC |
| | | CGGTTCTCGGGGTCGGGGTCCGGTACCGAGTTCACACTGACCATTTCC |
| | | TCGCTCGAGCCCGAGGACTTTGCCGTCTATTACTGCCAGCAGTACGGC |
| | | TCCTCCTCATGGACGTTCGGCCAGGGGACCAAGGTCGAAATCAAG |
| 139106-aa | 1017 | EVQLVETGGGLVQPGGSLRLSCAVSGFALSNHGMSWVRRAPGKGLEWV |
| VH | | SGIVYSGSTYYAASVKGRFTISRDNSRNTLYLQMNSLRPEDTAIYYCS |
| | | AHGGESDVWGQGTTVTVSS |
| 139106-aa | 1018 | EIVMTQSPATLSVSPGERATLSCRASQSVSSKLAWYQQKPGQAPRLLM |
| VL | | YGASIRATGIPDRFSGSGSGTEFTLTISSLEPEDFAVYYCQQYGSSSW |
| | | TFGQGTKVEIK |
| 139106-aa | 1019 | MALPVTALLLPLALLLHAARPEVQLVETGGGLVQPGGSLRLSCAVSGF |
| Full CAR | | ALSNHGMSWVRRAPGKGLEWVSGIVYSGSTYYAASVKGRFTISRDNSR |
| | | NTLYLQMNSLRPEDTAIYYCSAHGGESDVWGQGTTVTVSSASGGGGSG |
| | | GRASGGGGSEIVMTQSPATLSVSPGERATLSCRASQSVSSKLAWYQQK |
| | | PGQAPRLLMYGASIRATGIPDRFSGSGSGTEFTLTISSLEPEDFAVYY |
| | | CQQYGSSSWTFGQGTKVEIKTTTPAPRPPTPAPTIASQPLSLRPEACR |
| | | PAAGGAVHTRGLDFACDIYIWAPLAGTCGVLLLSLVITLYCKRGRKKL |
| | | LYIFKQPFMRPVQTTQEEDGCSCRFPEEEEGGCELRVKFSRSADAPAY |
| | | KQGQNQLYNELNLGRREEYDVLDKRRGRDPEMGGKPRRKNPQEGLYNE |
| | | LQKDKMAEAYSEIGMKGERRRGKGHDGLYQGLSTATKDTYDALHMQAL |
| | | PPR |
| 139106-nt | 1020 | ATGGCCCTCCCTGTCACCGCCCTGCTGCTTCCGCTGGCTCTTCTGCTC |
| Full CAR | | CACGCCGCTCGGCCCGAAGTGCAATTGGTGGAAACTGGAGGAGGACTT |
| | | GTGCAACCTGGAGGATCATTGAGACTGAGCTGCGCAGTGTCGGGATTC |
| | | GCCCTGAGCAACCATGGAATGTCCTGGGTCAGAAGGGCCCCTGGAAAA |
| | | GGCCTCGAATGGGTGTCAGGGATCGTGTACTCCGGTTCCACTTACTAC |
| | | GCCGCCTCCGTGAAGGGGCGCTTCACTATCTCACGGGATAACTCCCGC |
| | | AATACCCTGTACCTCCAAATGAACAGCCTGCGGCCGGAGGATACCGCC |
| | | ATCTACTACTGTTCCGCCCACGGTGGAGAGTCTGACGTCTGGGGCCAG |
| | | GGAACTACCGTGACCGTGTCCTCCGCGTCCGGCGGTGGAGGGAGCGGC |
| | | GGCCGCGCCAGCGGCGGCGGAGGCTCCGAGATCGTGATGACCCAGAGC |
| | | CCCGCTACTCTGTCGGTGTCGCCCGGAGAAAGGGCGACCCTGTCCTGC |
| | | CGGGCGTCGCAGTCCGTGAGCAGCAAGCTGGCTTGGTACCAGCAGAAG |
| | | CCGGGCCAGGCACCACGCCTGCTTATGTACGGTGCCTCCATTCGGGCC |
| | | ACCGGAATCCCGGACCGGTTCTCGGGGTCGGGGTCCGGTACCGAGTTC |
| | | ACACTGACCATTTCCTCGCTCGAGCCCGAGGACTTTGCCGTCTATTAC |
| | | TGCCAGCAGTACGGCTCCTCCTCATGGACGTTCGGCCAGGGGACCAAG |
| | | GTCGAAATCAAGACCACTACCCCAGCACCGAGGCCACCCACCCCGGCT |
| | | CCTACCATCGCCTCCCAGCCTCTGTCCCTGCGTCCGGAGGCATGTAGA |
| | | CCCGCAGCTGGTGGGGCCGTGCATACCCGGGGTCTTGACTTCGCCTGC |
| | | GATATCTACATTTGGGCCCCTCTGGCTGGTACTTGCGGGGTCCTGCTG |
| | | CTTTCACTCGTGATCACTCTTTACTGTAAGCGCGGTCGGAAGAAGCTG |
| | | CTGTACATCTTTAAGCAACCCTTCATGAGGCCTGTGCAGACTACTCAA |
| | | GAGGAGGACGGCTGTTCATGCCGGTTCCCAGAGGAGGAGGAAGGCGGC |
| | | TGCGAACTGCGCGTGAAATTCAGCCGCAGCGCAGATGCTCCAGCCTAC |
| | | AAGCAGGGGCAGAACCAGCTCTACAACGAACTCAATCTTGGTCGGAGA |
| | | GAGGAGTACGACGTGCTGGACAAGCGGAGAGGACGGGACCCAGAAATG |
| | | GGCGGGAAGCCGCGCAGAAAGAATCCCCAAGAGGGCCTGTACAACGAG |
| | | CTCCAAAAGGATAAGATGGCAGAAGCCTATAGCGAGATTGGTATGAAA |
| | | GGGGAACGCAGAAGAGGCAAAGGCCACGACGGACTGTACCAGGGACTC |
| | | AGCACCGCCACCAAGGACACCTATGACGCTCTTCACATGCAGGCCCTG |
| | | CCGCCTCGG |

139107

| | | |
|---|---|---|
| 139107-aa | 1021 | EVQLVETGGGVVQPGGSLRLSCAVSGFALSNHGMSWVRRAPGKGLEWV |
| ScFv domain | | SGIVYSGSTYYAASVKGRFTISRDNSRNTLYLQMNSLRPEDTAIYYCS |
| | | AHGGESDVWGQGTTVTVSSASGGGGSGGRASGGGGSEIVLTQSPGTLS |
| | | LSPGERATLSCRASQSVGSTNLAWYQQKPGQAPRLLIYDASNRATGIP |
| | | DRFSGGGSGTDFTLTISRLEPEDFAVYYCQQYGSSPPWTFGQGTKVEI |
| | | K |
| 139107-nt | 1022 | GAAGTGCAATTGGTGGAGACTGGAGGAGGAGTGGTGCAACCTGGAGGA |
| ScFv domain | | AGCCTGAGACTGTCATGCGCGGTGTCGGGCTTCGCCCTCTCCAACCAC |
| | | GGAATGTCCTGGGTCCGCCGGGCCCCTGGGAAAGGACTTGAATGGGTG |
| | | TCCGGCATCGTGTACTCGGGTTCCACCTACTACGCGGCCTCAGTGAAG |
| | | GGCCGGTTTACTATTAGCCGCGACAACTCCAGAAACACACTGTACCTC |
| | | CAAATGAACTCGCTGCGGCCGGAAGATACCGCTATCTACTACTGCTCC |
| | | GCCCATGGGGGAGAGTCGGACGTCTGGGGACAGGGCACCACTGTCACT |
| | | GTGTCCAGCGCTTCCGGCGGTGGTGGAAGCGGGGGACGGGCCTCAGGA |
| | | GGCGGTGGCAGCGAGATTGTGCTGACCCAGTCCCCCGGGACCCTGAGC |
| | | CTGTCCCCGGGAGAAAGGGCCACCCTCTCCTGTCGGGCATCCCAGTCC |
| | | GTGGGGTCTACTAACCTTGCATGGTACCAGCAGAAGCCCGGCCAGGCC |
| | | CCTCGCCTGCTGATCTACGACGCGTCCAATAGAGCCACCGGCATCCCG |
| | | GATCGCTTCAGCGGAGGCGGATCGGGCACCGACTTCACCCTCACCATT |
| | | TCAAGGCTGGAACCGGAGGACTTCGCCGTGTACTACTGCCAGCAGTAT |
| | | GGTTCGTCCCCACCCTGGACGTTCGGCCAGGGGACTAAGGTCGAGATC |
| | | AAG |
| 139107-aa | 1023 | EVQLVETGGGVVQPGGSLRLSCAVSGFALSNHGMSWVRRAPGKGLEWV |
| VH | | SGIVYSGSTYYAASVKGRFTISRDNSRNTLYLQMNSLRPEDTAIYYCS |
| | | AHGGESDVWGQGTTVTVSS |
| 139107-aa | 1024 | EIVLTQSPGTLSLSPGERATLSCRASQSVGSTNLAWYQQKPGQAPRLL |
| VL | | IYDASNRATGIPDRFSGGGSGTDFTLTISRLEPEDFAVYYCQQYGSSP |
| | | PWTFGQGTKVEIK |
| 139107-aa | 1025 | MALPVTALLLPLALLLHAARPEVQLVETGGGVVQPGGSLRLSCAVSGF |
| Full CAR | | ALSNHGMSWVRRAPGKGLEWVSGIVYSGSTYYAASVKGRFTISRDNSR |
| | | NTLYLQMNSLRPEDTAIYYCSAHGGESDVWGQGTTVTVSSASGGGGSG |
| | | GRASGGGGSEIVLTQSPGTLSLSPGERATLSCRASQSVGSTNLAWYQQ |
| | | KPGQAPRLLIYDASNRATGIPDRFSGGGSGTDFTLTISRLEPEDFAVY |
| | | YCQQYGSSPPWTFGQGTKVEIKTTTPAPRPPTPAPTIASQPLSLRPEA |
| | | CRPAAGGAVHTRGLDFACDIYIWAPLAGTCGVLLLSLVITLYCKRGRK |
| | | KLLYIFKQPFMRPVQTTQEEDGCSCRFPEEEEGGCELRVKFSRSADAP |
| | | AYKQGQNQLYNELNLGRREEYDVLDKRRGRDPEMGGKPRRKNPQEGLY |
| | | NELQKDKMAEAYSEIGMKGERRRGKGHDGLYQGLSTATKDTYDALHMQ |
| | | ALPPR |
| 139107-nt | 1026 | ATGGCCCTCCCTGTCACCGCCCTGCTGCTTCCGCTGGCTCTTCTGCTC |
| Full CAR | | CACGCCGCTCGGCCCGAAGTGCAATTGGTGGAGACTGGAGGAGGAGTG |
| | | GTGCAACCTGGAGGAAGCCTGAGACTGTCATGCGCGGTGTCGGGCTTC |
| | | GCCCTCTCCAACCACGGAATGTCCTGGGTCCGCCGGGCCCCTGGGAAA |
| | | GGACTTGAATGGGTGTCCGGCATCGTGTACTCGGGTTCCACCTACTAC |
| | | GCGGCCTCAGTGAAGGGCCGGTTTACTATTAGCCGCGACAACTCCAGA |
| | | AACACACTGTACCTCCAAATGAACTCGCTGCGGCCGGAAGATACCGCT |
| | | ATCTACTACTGCTCCGCCCATGGGGGAGAGTCGGACGTCTGGGGACAG |
| | | GGCACCACTGTCACTGTGTCCAGCGCTTCCGGCGGTGGTGGAAGCGGG |
| | | GGACGGGCCTCAGGAGGCGGTGGCAGCGAGATTGTGCTGACCCAGTCC |
| | | CCCGGGACCCTGAGCCTGTCCCCGGGAGAAAGGGCCACCCTCTCCTGT |
| | | CGGGCATCCCAGTCCGTGGGGTCTACTAACCTTGCATGGTACCAGCAG |
| | | AAGCCCGGCCAGGCCCCTCGCCTGCTGATCTACGACGCGTCCAATAGA |
| | | GCCACCGGCATCCCGGATCGCTTCAGCGGAGGCGGATCGGGCACCGAC |
| | | TTCACCCTCACCATTTCAAGGCTGGAACCGGAGGACTTCGCCGTGTAC |
| | | TACTGCCAGCAGTATGGTTCGTCCCCACCCTGGACGTTCGGCCAGGGG |
| | | ACTAAGGTCGAGATCAAGACCACTACCCCAGCACCGAGGCCACCCACC |
| | | CCGGCTCCTACCATCGCCTCCCAGCCTCTGTCCCTGCGTCCGGAGGCA |
| | | TGTAGACCCGCAGCTGGTGGGGCCGTGCATACCCGGGGTCTTGACTTC |
| | | GCCTGCGATATCTACATTTGGGCCCCTCTGGCTGGTACTTGCGGGGTC |
| | | CTGCTGCTTTCACTCGTGATCACTCTTTACTGTAAGCGCGGTCGGAAG |
| | | AAGCTGCTGTACATCTTTAAGCAACCCTTCATGAGGCCTGTGCAGACT |
| | | ACTCAAGAGGAGGACGGCTGTTCATGCCGGTTCCCAGAGGAGGAGGAA |
| | | GGCGGCTGCGAACTGCGCGTGAAATTCAGCCGCAGCGCAGATGCTCCA |
| | | GCCTACAAGCAGGGGCAGAACCAGCTCTACAACGAACTCAATCTTGGT |
| | | CGGAGAGAGGAGTACGACGTGCTGGACAAGCGGAGAGGACGGGACCCA |
| | | GAAATGGGCGGGAAGCCGCGCAGAAAGAATCCCCAAGAGGGCCTGTAC |
| | | AACGAGCTCCAAAAGGATAAGATGGCAGAAGCCTATAGCGAGATTGGT |
| | | ATGAAAGGGGAACGCAGAAGAGGCAAAGGCCACGACGGACTGTACCAG |
| | | GGACTCAGCACCGCCACCAAGGACACCTATGACGCTCTTCACATGCAG |
| | | GCCCTGCCGCCTCGG |

139108

| | | |
|---|---|---|
| 139108-aa | 1027 | QVQLVESGGGLVKPGGSLRLSCAASGFTFSDYYMSWIRQAPGKGLEWV |
| ScFv domain | | SYISSSGSTIYYADSVKGRFTISRDNAKNSLYLQMNSLRAEDTAVYYC |
| | | ARESGDGMDVWGQGTTVTVSSASGGGGSGGRASGGGGSDIQMTQSPSS |
| | | LSASVGDRVTITCRASQSISSYLNWYQQKPGKAPKLLIYAASSLQSGV |
| | | PSRFSGSGSGTDFTLTISSLQPEDFATYYCQQSYTLAFGQGTKVDIK |
| 139108-nt | 1028 | CAAGTGCAACTCGTGGAATCTGGTGGAGGACTCGTGAAACCTGGAGGA |
| ScFv domain | | TCATTGAGACTGTCATGCGCGGCCTCGGGATTCACGTTCTCCGATTAC |
| | | TACATGAGCTGGATTCGCCAGGCTCCGGGGAAGGGACTGGAATGGGTG |
| | | TCCTACATTTCCTCATCCGGCTCCACCATCTACTACGCGGACTCCGTG |
| | | AAGGGGAGATTCACCATTAGCCGCGATAACGCCAAGAACAGCCTGTAC |
| | | CTTCAGATGAACTCCCTGCGGGCTGAAGATACTGCCGTCTACTACTGC |
| | | GCAAGGGAGAGCGGAGATGGGATGGACGTCTGGGGACAGGGTACCACT |
| | | GTGACCGTGTCGTCGGCCTCCGGCGGAGGGGGTTCGGGTGGAAGGGCC |
| | | AGCGGCGGCGGAGGCAGCGACATCCAGATGACCCAGTCCCCCTCATCG |
| | | CTGTCCGCCTCCGTGGGCGACCGCGTCACCATCACATGCCGGGCCTCA |
| | | CAGTCGATCTCCTCCTACCTCAATTGGTATCAGCAGAAGCCCGGAAAG |
| | | GCCCCTAAGCTTCTGATCTACGCAGCGTCCTCCCTGCAATCCGGGGTC |
| | | CCATCTCGGTTCTCCGGCTCGGGCAGCGGTACCGACTTCACTCTGACC |
| | | ATCTCGAGCCTGCAGCCGGAGGACTTCGCCACTTACTACTGTCAGCAA |
| | | AGCTACACCCTCGCGTTTGGCCAGGGCACCAAAGTGGACATCAAG |
| 139108-aa | 1029 | QVQLVESGGGLVKPGGSLRLSCAASGFTFSDYYMSWIRQAPGKGLEWV |
| VH | | SYISSSGSTIYYADSVKGRFTISRDNAKNSLYLQMNSLRAEDTAVYYC |
| | | ARESGDGMDVWGQGTTVTVSS |
| 139108-aa | 1030 | DIQMTQSPSSLSASVGDRVTITCRASQSISSYLNWYQQKPGKAPKLLI |
| VL | | YAASSLQSGVPSRFSGSGSGTDFTLTISSLQPEDFATYYCQQSYTLAF |
| | | GQGTKVDIK |
| 139108-aa | 1031 | MALPVTALLLPLALLLHAARPQVQLVESGGGLVKPGGSLRLSCAASGF |
| Full CAR | | TFSDYYMSWIRQAPGKGLEWVSYISSSGSTIYYADSVKGRFTISRDNA |
| | | KNSLYLQMNSLRAEDTAVYYCARESGDGMDVWGQGTTVTVSSASGGGG |
| | | SGGRASGGGGSDIQMTQSPSSLSASVGDRVTITCRASQSISSYLNWYQ |
| | | QKPGKAPKLLIYAASSLQSGVPSRFSGSGSGTDFTLTISSLQPEDFAT |
| | | YYCQQSYTLAFGQGTKVDIKTTTPAPRPPTPAPTIASQPLSLRPEACR |
| | | PAAGGAVHTRGLDFACDIYIWAPLAGTCGVLLLSLVITLYCKRGRKKL |
| | | LYIFKQPFMRPVQTTQEEDGCSCRFPEEEEGGCELRVKFSRSADAPAY |
| | | KQGQNQLYNELNLGRREEYDVLDKRRGRDPEMGGKPRRKNPQEGLYNE |
| | | LQKDKMAEAYSEIGMKGERRRGKGHDGLYQGLSTATKDTYDALHMQAL |
| | | PPR |
| 139108-nt | 1032 | ATGGCCCTCCCTGTCACCGCCCTGCTGCTTCCGCTGGCTCTTCTGCTC |
| Full CAR | | CACGCCGCTCGGCCCCAAGTGCAACTCGTGGAATCTGGTGGAGGACTC |
| | | GTGAAACCTGGAGGATCATTGAGACTGTCATGCGCGGCCTCGGGATTC |
| | | ACGTTCTCCGATTACTACATGAGCTGGATTCGCCAGGCTCCGGGGAAG |
| | | GGACTGGAATGGGTGTCCTACATTTCCTCATCCGGCTCCACCATCTAC |
| | | TACGCGGACTCCGTGAAGGGGAGATTCACCATTAGCCGCGATAACGCC |
| | | AAGAACAGCCTGTACCTTCAGATGAACTCCCTGCGGGCTGAAGATACT |
| | | GCCGTCTACTACTGCGCAAGGGAGAGCGGAGATGGGATGGACGTCTGG |
| | | GGACAGGGTACCACTGTGACCGTGTCGTCGGCCTCCGGCGGAGGGGGT |
| | | TCGGGTGGAAGGGCCAGCGGCGGCGGAGGCAGCGACATCCAGATGACC |
| | | CAGTCCCCCTCATCGCTGTCCGCCTCCGTGGGCGACCGCGTCACCATC |
| | | ACATGCCGGGCCTCACAGTCGATCTCCTCCTACCTCAATTGGTATCAG |
| | | CAGAAGCCCGGAAAGGCCCCTAAGCTTCTGATCTACGCAGCGTCCTCC |
| | | CTGCAATCCGGGGTCCCATCTCGGTTCTCCGGCTCGGGCAGCGGTACC |
| | | GACTTCACTCTGACCATCTCGAGCCTGCAGCCGGAGGACTTCGCCACT |
| | | TACTACTGTCAGCAAAGCTACACCCTCGCGTTTGGCCAGGGCACCAAA |
| | | GTGGACATCAAGACCACTACCCCAGCACCGAGGCCACCCACCCCGGCT |
| | | CCTACCATCGCCTCCCAGCCTCTGTCCCTGCGTCCGGAGGCATGTAGA |
| | | CCCGCAGCTGGTGGGGCCGTGCATACCCGGGGTCTTGACTTCGCCTGC |
| | | GATATCTACATTTGGGCCCCTCTGGCTGGTACTTGCGGGGTCCTGCTG |
| | | CTTTCACTCGTGATCACTCTTTACTGTAAGCGCGGTCGGAAGAAGCTG |
| | | CTGTACATCTTTAAGCAACCCTTCATGAGGCCTGTGCAGACTACTCAA |
| | | GAGGAGGACGGCTGTTCATGCCGGTTCCCAGAGGAGGAGGAAGGCGGC |
| | | TGCGAACTGCGCGTGAAATTCAGCCGCAGCGCAGATGCTCCAGCCTAC |
| | | AAGCAGGGGCAGAACCAGCTCTACAACGAACTCAATCTTGGTCGGAGA |
| | | GAGGAGTACGACGTGCTGGACAAGCGGAGAGGACGGGACCCAGAAATG |
| | | GGCGGGAAGCCGCGCAGAAAGAATCCCCAAGAGGGCCTGTACAACGAG |
| | | CTCCAAAAGGATAAGATGGCAGAAGCCTATAGCGAGATTGGTATGAAA |
| | | GGGGAACGCAGAAGAGGCAAAGGCCACGACGGACTGTACCAGGGACTC |
| | | AGCACCGCCACCAAGGACACCTATGACGCTCTTCACATGCAGGCCCTG |
| | | CCGCCTCGG |

139110

| | | |
|---|---|---|
| 139110-aa | 1033 | QVQLVQSGGGLVKPGGSLRLSCAASGFTFSDYYMSWIRQAPGKGLEWV |
| ScFv domain | | SYISSSGNTIYYADSVKGRFTISRDNAKNSLYLQMNSLRAEDTAVYYC |
| | | ARSTMVREDYWGQGTLVTVSSASGGGGSGGRASGGGGSDIVLTQSPLS |
| | | LPVTLGQPASISCKSSESLVHNSGKTYLNWFHQRPGQSPRRLIYEVSN |
| | | RDSGVPDRFTGSGSGTDFTLKISRVEAEDVGVYYCMQGTHWPGTFGQG |
| | | TKLEIK |
| 139110-nt | 1034 | CAAGTGCAACTGGTGCAAAGCGGAGGAGGATTGGTCAAACCCGGAGGA |
| ScFv domain | | AGCCTGAGACTGTCATGCGCGGCCTCTGGATTCACCTTCTCCGATTAC |
| | | TACATGTCATGGATCAGACAGGCCCCGGGGAAGGGCCTCGAATGGGTG |
| | | TCCTACATCTCGTCCTCCGGGAACACCATCTACTACGCCGACAGCGTG |
| | | AAGGGCCGCTTTACCATTTCCCGCGACAACGCAAAGAACTCGCTGTAC |
| | | CTTCAGATGAATTCCCTGCGGGCTGAAGATACCGCGGTGTACTATTGC |
| | | GCCCGGTCCACTATGGTCCGGGAGGACTACTGGGGACAGGGCACACTC |
| | | GTGACCGTGTCCAGCGCGAGCGGGGGTGGAGGCAGCGGTGGACGCGCC |
| | | TCCGGCGGCGGCGGTTCAGACATCGTGCTGACTCAGTCGCCCCTGTCG |
| | | CTGCCGGTCACCCTGGGCCAACCGGCCTCAATTAGCTGCAAGTCCTCG |
| | | GAGAGCCTGGTGCACAACTCAGGAAAGACTTACCTGAACTGGTTCCAT |
| | | CAGCGGCCTGGACAGTCCCCACGGAGGCTCATCTATGAAGTGTCCAAC |
| | | AGGGATTCGGGGGTGCCCGACCGCTTCACTGGCTCCGGGTCCGGCACC |
| | | GACTTCACCTTGAAAATCTCCAGAGTGGAAGCCGAGGACGTGGGCGTG |
| | | TACTACTGTATGCAGGGTACCCACTGGCCTGGAACCTTTGGACAAGGA |
| | | ACTAAGCTCGAGATTAAG |
| 139110-aa | 1035 | QVQLVQSGGGLVKPGGSLRLSCAASGFTFSDYYMSWIRQAPGKGLEWV |
| VH | | SYISSSGNTIYYADSVKGRFTISRDNAKNSLYLQMNSLRAEDTAVYYC |
| | | ARSTMVREDYWGQGTLVTVSS |
| 139110-aa | 1036 | DIVLTQSPLSLPVTLGQPASISCKSSESLVHNSGKTYLNWFHQRPGQS |
| VL | | PRRLIYEVSNRDSGVPDRFTGSGSGTDFTLKISRVEAEDVGVYYCMQG |
| | | THWPGTFGQGTKLEIK |
| 139110-aa | 1037 | MALPVTALLLPLALLLHAARPQVQLVQSGGGLVKPGGSLRLSCAASGF |
| Full CAR | | TFSDYYMSWIRQAPGKGLEWVSYISSSGNTIYYADSVKGRFTISRDNA |
| | | KNSLYLQMNSLRAEDTAVYYCARSTMVREDYWGQGTLVTVSSASGGGG |
| | | SGGRASGGGGSDIVLTQSPLSLPVTLGQPASISCKSSESLVHNSGKTY |
| | | LNWFHQRPGQSPRRLIYEVSNRDSGVPDRFTGSGSGTDFTLKISRVEA |
| | | EDVGVYYCMQGTHWPGTFGQGTKLEIKTTTPAPRPPTPAPTIASQPLS |
| | | LRPEACRPAAGGAVHTRGLDFACDIYIWAPLAGTCGVLLLSLVITLYC |
| | | KRGRKKLLYIFKQPFMRPVQTTQEEDGCSCRFPEEEEGGCELRVKFSR |
| | | SADAPAYKQGQNQLYNELNLGRREEYDVLDKRRGRDPEMGGKPRRKNP |
| | | QEGLYNELQKDKMAEAYSEIGMKGERRRGKGHDGLYQGLSTATKDTYD |
| | | ALHMQALPPR |
| 139110-nt | 1038 | ATGGCCCTCCCTGTCACCGCCCTGCTGCTTCCGCTGGCTCTTCTGCTC |
| Full CAR | | CACGCCGCTCGGCCCCAAGTGCAACTGGTGCAAAGCGGAGGAGGATTG |
| | | GTCAAACCCGGAGGAAGCCTGAGACTGTCATGCGCGGCCTCTGGATTC |
| | | ACCTTCTCCGATTACTACATGTCATGGATCAGACAGGCCCCGGGGAAG |
| | | GGCCTCGAATGGGTGTCCTACATCTCGTCCTCCGGGAACACCATCTAC |
| | | TACGCCGACAGCGTGAAGGGCCGCTTTACCATTTCCCGCGACAACGCA |
| | | AAGAACTCGCTGTACCTTCAGATGAATTCCCTGCGGGCTGAAGATACC |
| | | GCGGTGTACTATTGCGCCCGGTCCACTATGGTCCGGGAGGACTACTGG |
| | | GGACAGGGCACACTCGTGACCGTGTCCAGCGCGAGCGGGGGTGGAGGC |
| | | AGCGGTGGACGCGCCTCCGGCGGCGGCGGTTCAGACATCGTGCTGACT |
| | | CAGTCGCCCCTGTCGCTGCCGGTCACCCTGGGCCAACCGGCCTCAATT |
| | | AGCTGCAAGTCCTCGGAGAGCCTGGTGCACAACTCAGGAAAGACTTAC |
| | | CTGAACTGGTTCCATCAGCGGCCTGGACAGTCCCCACGGAGGCTCATC |
| | | TATGAAGTGTCCAACAGGGATTCGGGGGTGCCCGACCGCTTCACTGGC |
| | | TCCGGGTCCGGCACCGACTTCACCTTGAAAATCTCCAGAGTGGAAGCC |
| | | GAGGACGTGGGCGTGTACTACTGTATGCAGGGTACCCACTGGCCTGGA |
| | | ACCTTTGGACAAGGAACTAAGCTCGAGATTAAGACCACTACCCCAGCA |
| | | CCGAGGCCACCCACCCCGGCTCCTACCATCGCCTCCCAGCCTCTGTCC |
| | | CTGCGTCCGGAGGCATGTAGACCCGCAGCTGGTGGGGCCGTGCATACC |
| | | CGGGGTCTTGACTTCGCCTGCGATATCTACATTTGGGCCCCTCTGGCT |
| | | GGTACTTGCGGGGTCCTGCTGCTTTCACTCGTGATCACTCTTTACTGT |
| | | AAGCGCGGTCGGAAGAAGCTGCTGTACATCTTTAAGCAACCCTTCATG |
| | | AGGCCTGTGCAGACTACTCAAGAGGAGGACGGCTGTTCATGCCGGTTC |
| | | CCAGAGGAGGAGGAAGGCGGCTGCGAACTGCGCGTGAAATTCAGCCGC |
| | | AGCGCAGATGCTCCAGCCTACAAGCAGGGGCAGAACCAGCTCTACAAC |
| | | GAACTCAATCTTGGTCGGAGAGAGGAGTACGACGTGCTGGACAAGCGG |
| | | AGAGGACGGGACCCAGAAATGGGCGGGAAGCCGCGCAGAAAGAATCCC |
| | | CAAGAGGGCCTGTACAACGAGCTCCAAAAGGATAAGATGGCAGAAGCC |
| | | TATAGCGAGATTGGTATGAAAGGGGAACGCAGAAGAGGCAAAGGCCAC |
| | | GACGGACTGTACCAGGGACTCAGCACCGCCACCAAGGACACCTATGAC |
| | | GCTCTTCACATGCAGGCCCTGCCGCCTCGG |

139112

| | | |
|---|---|---|
| 139112-aa | 1039 | QVQLVESGGGLVQPGGSLRLSCAVSGFALSNHGMSWVRRAPGKGLEWV |
| ScFv domain | | SGIVYSGSTYYAASVKGRFTISRDNSRNTLYLQMNSLRPEDTAIYYCS |
| | | AHGGESDVWGQGTTVTVSSASGGGGSGGRASGGGGSDIRLTQSPSPLS |
| | | ASVGDRVTITCQASEDINKFLNWYHQTPGKAPKLLIYDASTLQTGVPS |
| | | RFSGSGSGTDFTLTINSLQPEDIGTYYCQQYESLPLTFGGGTKVEIK |
| 139112-nt | 1040 | CAAGTGCAACTCGTGGAATCTGGTGGAGGACTCGTGCAACCCGGTGGA |
| ScFv domain | | AGCCTTAGGCTGTCGTGCGCCGTCAGCGGGTTTGCTCTGAGCAACCAT |
| | | GGAATGTCCTGGGTCCGCCGGGCACCGGGAAAAGGGCTGGAATGGGTG |
| | | TCCGGCATCGTGTACAGCGGGTCAACCTATTACGCCGCGTCCGTGAAG |
| | | GGCAGATTCACTATCTCAAGAGACAACAGCCGGAACACCCTGTACTTG |
| | | CAAATGAATTCCCTGCGCCCCGAGGACACCGCCATCTACTACTGCTCC |
| | | GCCCACGGAGGAGAGTCGGACGTGTGGGGCCAGGGAACGACTGTGACT |
| | | GTGTCCAGCGCATCAGGAGGGGGTGGTTCGGGCGGCCGGGCCTCGGGG |
| | | GGAGGAGGTTCCGACATTCGGCTGACCCAGTCCCCGTCCCCACTGTCG |
| | | GCCTCCGTCGGCGACCGCGTGACCATCACTTGTCAGGCGTCCGAGGAC |
| | | ATTAACAAGTTCCTGAACTGGTACCACCAGACCCCTGGAAAGGCCCCC |
| | | AAGCTGCTGATCTACGATGCCTCGACCCTTCAAACTGGAGTGCCTAGC |
| | | CGGTTCTCCGGGTCCGGCTCCGGCACTGATTTCACTCTGACCATCAAC |
| | | TCATTGCAGCCGGAAGATATCGGGACCTACTATTGCCAGCAGTACGAA |
| | | TCCCTCCCGCTCACATTCGGCGGGGGAACCAAGGTCGAGATTAAG |
| 139112-aa | 1041 | QVQLVESGGGLVQPGGSLRLSCAVSGFALSNHGMSWVRRAPGKGLEWV |
| VH | | SGIVYSGSTYYAASVKGRFTISRDNSRNTLYLQMNSLRPEDTAIYYCS |
| | | AHGGESDVWGQGTTVTVSS |
| 139112-aa | 1042 | DIRLTQSPSPLSASVGDRVTITCQASEDINKFLNWYHQTPGKAPKLLI |
| VL | | YDASTLQTGVPSRFSGSGSGTDFTLTINSLQPEDIGTYYCQQYESLPL |
| | | TFGGGTKVEIK |
| 139112-aa | 1043 | MALPVTALLLPLALLLHAARPQVQLVESGGGLVQPGGSLRLSCAVSGF |
| Full CAR | | ALSNHGMSWVRRAPGKGLEWVSGLVYSGSTYYAASVKGRFTISRDNSR |
| | | NTLYLQMNSLRPEDTAIYYCSAHGGESDVWGQGTTVTVSSASGGGGSG |
| | | GRASGGGGSDIRLTQSPSPLSASVGDRVTITCQASEDINKFLNWYHQT |
| | | PGKAPKLLIYDASTLQTGVPSRFSGSGSGTDFTLTINSLQPEDIGTYY |
| | | CQQYESLPLTFGGGTKVEIKTTTPAPRPPTPAPTIASQPLSLRPEACR |
| | | PAAGGAVHTRGLDFACDIYIWAPLAGTCGVLLLSLVITLYCKRGRKKL |
| | | LYIFKQPFMRPVQTTQEEDGCSCRFPEEEEGGCELRVKFSRSADAPAY |
| | | KQGQNQLYNELNLGRREEYDVLDKRRGRDPEMGGKPRRKNPQEGLYNE |
| | | LQKDKMAEAYSEIGMKGERRRGKGHDGLYQGLSTATKDTYDALHMQAL |
| | | PPR |
| 139112-nt | 1044 | ATGGCCCTCCCTGTCACCGCCCTGCTGCTTCCGCTGGCTCTTCTGCTC |
| Full CAR | | CACGCCGCTCGGCCCCAAGTGCAACTCGTGGAATCTGGTGGAGGACTC |
| | | GTGCAACCCGGTGGAAGCCTTAGGCTGTCGTGCGCCGTCAGCGGGTTT |
| | | GCTCTGAGCAACCATGGAATGTCCTGGGTCCGCCGGGCACCGGGAAAA |
| | | GGGCTGGAATGGGTGTCCGGCATCGTGTACAGCGGGTCAACCTATTAC |
| | | GCCGCGTCCGTGAAGGGCAGATTCACTATCTCAAGAGACAACAGCCGG |
| | | AACACCCTGTACTTGCAAATGAATTCCCTGCGCCCCGAGGACACCGCC |
| | | ATCTACTACTGCTCCGCCCACGGAGGAGAGTCGGACGTGTGGGGCCAG |
| | | GGAACGACTGTGACTGTGTCCAGCGCATCAGGAGGGGGTGGTTCGGGC |
| | | GGCCGGGCCTCGGGGGGAGGAGGTTCCGACATTCGGCTGACCCAGTCC |
| | | CCGTCCCCACTGTCGGCCTCCGTCGGCGACCGCGTGACCATCACTTGT |
| | | CAGGCGTCCGAGGACATTAACAAGTTCCTGAACTGGTACCACCAGACC |
| | | CCTGGAAAGGCCCCCAAGCTGCTGATCTACGATGCCTCGACCCTTCAA |
| | | ACTGGAGTGCCTAGCCGGTTCTCCGGGTCCGGCTCCGGCACTGATTTC |
| | | ACTCTGACCATCAACTCATTGCAGCCGGAAGATATCGGGACCTACTAT |
| | | TGCCAGCAGTACGAATCCCTCCCGCTCACATTCGGCGGGGGAACCAAG |
| | | GTCGAGATTAAGACCACTACCCCAGCACCGAGGCCACCCACCCCGGCT |
| | | CCTACCATCGCCTCCCAGCCTCTGTCCCTGCGTCCGGAGGCATGTAGA |
| | | CCCGCAGCTGGTGGGGCCGTGCATACCCGGGGTCTTGACTTCGCCTGC |
| | | GATATCTACATTTGGGCCCCTCTGGCTGGTACTTGCGGGGTCCTGCTG |
| | | CTTTCACTCGTGATCACTCTTTACTGTAAGCGCGGTCGGAAGAAGCTG |
| | | CTGTACATCTTTAAGCAACCCTTCATGAGGCCTGTGCAGACTACTCAA |
| | | GAGGAGGACGGCTGTTCATGCCGGTTCCCAGAGGAGGAGGAAGGCGGC |
| | | TGCGAACTGCGCGTGAAATTCAGCCGCAGCGCAGATGCTCCAGCCTAC |
| | | AAGCAGGGGCAGAACCAGCTCTACAACGAACTCAATCTTGGTCGGAGA |
| | | GAGGAGTACGACGTGCTGGACAAGCGGAGAGGACGGGACCCAGAAATG |
| | | GGCGGGAAGCCGCGCAGAAAGAATCCCCAAGAGGGCCTGTACAACGAG |
| | | CTCCAAAAGGATAAGATGGCAGAAGCCTATAGCGAGATTGGTATGAAA |
| | | GGGGAACGCAGAAGAGGCAAAGGCCACGACGGACTGTACCAGGGACTC |
| | | AGCACCGCCACCAAGGACACCTATGACGCTCTTCACATGCAGGCCCTG |
| | | CCGCCTCGG |

139113

| | | |
|---|---|---|
| 139113-aa | 1045 | EVQLVETGGGLVQPGGSLRLSCAVSGFALSNHGMSWVRRAPGKGLEWV |
| ScFv domain | | SGIVYSGSTYYAASVKGRFTISRDNSRNTLYLQMNSLRPEDTAIYYCS |
| | | AHGGESDVWGQGTTVTVSSASGGGGSGGRASGGGGSETTLTQSPATLS |
| | | VSPGERATLSCRASQSVGSNLAWYQQKPGQGPRLLIYGASTRATGIPA |
| | | RFSGSGSGTEFTLTISSLQPEDFAVYYCQQYNDWLPVTFGQGTKVEIK |
| 139113-nt | 1046 | GAAGTGCAATTGGTGGAAACTGGAGGAGGACTTGTGCAACCTGGAGGA |
| ScFv domain | | TCATTGCGGCTCTCATGCGCTGTCTCCGGCTTCGCCCTGTCAAATCAC |
| | | GGGATGTCGTGGGTCAGACGGGCCCCGGGAAAGGGTCTGGAATGGGTG |
| | | TCGGGGATTGTGTACAGCGGCTCCACCTACTACGCCGCTTCGGTCAAG |
| | | GGCCGCTTCACTATTTCACGGGACAACAGCCGCAACACCCTCTATCTG |
| | | CAAATGAACTCTCTCCGCCCGGAGGATACCGCCATCTACTACTGCTCC |
| | | GCACACGGCGGCGAATCCGACGTGTGGGGACAGGGAACCACTGTCACC |
| | | GTGTCGTCCGCATCCGGTGGCGGAGGATCGGGTGGCCGGGCCTCCGGG |
| | | GGCGGCGGCAGCGAGACTACCCTGACCCAGTCCCCTGCCACTCTGTCC |
| | | GTGAGCCCGGGAGAGAGAGCCACCCTTAGCTGCCGGGCCAGCCAGAGC |
| | | GTGGGCTCCAACCTGGCCTGGTACCAGCAGAAGCCAGGACAGGGTCCC |
| | | AGGCTGCTGATCTACGGAGCCTCCACTCGCGCGACCGGCATCCCCGCG |
| | | AGGTTCTCCGGGTCGGGTTCCGGGACCGAGTTCACCCTGACCATCTCC |
| | | TCCCTCCAACCGGAGGACTTCGCGGTGTACTACTGTCAGCAGTACAAC |
| | | GATTGGCTGCCCGTGACATTTGGACAGGGGACGAAGGTGGAAATCAAA |
| 139113-aa | 1047 | EVQLVETGGGLVQPGGSLRLSCAVSGFALSNHGMSWVRRAPGKGLEWV |
| VH | | SGIVYSGSTYYAASVKGRFTISRDNSRNTLYLQMNSLRPEDTAIYYCS |
| | | AHGGESDVWGQGTTVTVSS |
| 139113-aa | 1048 | ETTLTQSPATLSVSPGERATLSCRASQSVGSNLAWYQQKPGQGPRLLI |
| VL | | YGASTRATGIPARFSGSGSGTEFTLTISSLQPEDFAVYYCQQYNDWLP |
| | | VTFGQGTKVEIK |
| 139113-aa | 1049 | MALPVTALLLPLALLLHAARPEVQLVETGGGLVQPGGSLRLSCAVSGF |
| Full CAR | | ALSNHGMSWVRRAPGKGLEWVSGIVYSGSTYYAASVKGRFTISRDNSR |
| | | NTLYLQMNSLRPEDTAIYYCSAHGGESDVWGQGTTVTVSSASGGGGSG |
| | | GRASGGGGSETTLTQSPATLSVSPGERATLSCRASQSVGSNLAWYQQK |
| | | PGQGPRLLIYGASTRATGIPARFSGSGSGTEFTLTISSLQPEDFAVYY |
| | | CQQYNDWLPVTFGQGTKVEIKTTTPAPRPPTPAPTIASQPLSLRPEAC |
| | | RPAAGGAVHTRGLDFACDIYIWAPLAGTCGVLLLSLVITLYCKRGRKK |
| | | LLYIFKQPFMRPVQTTQEEDGCSCRFPEEEEGGCELRVKFSRSADAPA |
| | | YKQGQNQLYNELNLGRREEYDVLDKRRGRDPEMGGKPRRKNPQEGLYN |
| | | ELQKDKMAEAYSEIGMKGERRRGKGHDGLYQGLSTATKDTYDALHMQA |
| | | LPPR |
| 139113-nt | 1050 | ATGGCCCTCCCTGTCACCGCCCTGCTGCTTCCGCTGGCTCTTCTGCTC |
| Full CAR | | CACGCCGCTCGGCCCGAAGTGCAATTGGTGGAAACTGGAGGAGGACTT |
| | | GTGCAACCTGGAGGATCATTGCGGCTCTCATGCGCTGTCTCCGGCTTC |
| | | GCCCTGTCAAATCACGGGATGTCGTGGGTCAGACGGGCCCCGGGAAAG |
| | | GGTCTGGAATGGGTGTCGGGGATTGTGTACAGCGGCTCCACCTACTAC |
| | | GCCGCTTCGGTCAAGGGCCGCTTCACTATTTCACGGGACAACAGCCGC |
| | | AACACCCTCTATCTGCAAATGAACTCTCTCCGCCCGGAGGATACCGCC |
| | | ATCTACTACTGCTCCGCACACGGCGGCGAATCCGACGTGTGGGGACAG |
| | | GGAACCACTGTCACCGTGTCGTCCGCATCCGGTGGCGGAGGATCGGGT |
| | | GGCCGGGCCTCCGGGGGCGGCGGCAGCGAGACTACCCTGACCCAGTCC |
| | | CCTGCCACTCTGTCCGTGAGCCCGGGAGAGAGAGCCACCCTTAGCTGC |
| | | CGGGCCAGCCAGAGCGTGGGCTCCAACCTGGCCTGGTACCAGCAGAAG |
| | | CCAGGACAGGGTCCCAGGCTGCTGATCTACGGAGCCTCCACTCGCGCG |
| | | ACCGGCATCCCCGCGAGGTTCTCCGGGTCGGGTTCCGGGACCGAGTTC |
| | | ACCCTGACCATCTCCTCCCTCCAACCGGAGGACTTCGCGGTGTACTAC |
| | | TGTCAGCAGTACAACGATTGGCTGCCCGTGACATTTGGACAGGGGACG |
| | | AAGGTGGAAATCAAAACCACTACCCCAGCACCGAGGCCACCCACCCCG |
| | | GCTCCTACCATCGCCTCCCAGCCTCTGTCCCTGCGTCCGGAGGCATGT |
| | | AGACCCGCAGCTGGTGGGGCCGTGCATACCCGGGGTCTTGACTTCGCC |
| | | TGCGATATCTACATTTGGGCCCCTCTGGCTGGTACTTGCGGGGTCCTG |
| | | CTGCTTTCACTCGTGATCACTCTTTACTGTAAGCGCGGTCGGAAGAAG |
| | | CTGCTGTACATCTTTAAGCAACCCTTCATGAGGCCTGTGCAGACTACT |
| | | CAAGAGGAGGACGGCTGTTCATGCCGGTTCCCAGAGGAGGAGGAAGGC |
| | | GGCTGCGAACTGCGCGTGAAATTCAGCCGCAGCGCAGATGCTCCAGCC |
| | | TACAAGCAGGGGCAGAACCAGCTCTACAACGAACTCAATCTTGGTCGG |
| | | AGAGAGGAGTACGACGTGCTGGACAAGCGGAGAGGACGGGACCCAGAA |
| | | ATGGGCGGGAAGCCGCGCAGAAAGAATCCCCAAGAGGGCCTGTACAAC |
| | | GAGCTCCAAAAGGATAAGATGGCAGAAGCCTATAGCGAGATTGGTATG |
| | | AAAGGGGAACGCAGAAGAGGCAAAGGCCACGACGGACTGTACCAGGGA |
| | | CTCAGCACCGCCACCAAGGACACCTATGACGCTCTTCACATGCAGGCC |
| | | CTGCCGCCTCGG |

139114

| | | |
|---|---|---|
| 139114-aa | 1051 | EVQLVESGGGLVQPGGSLRLSCAVSGFALSNHGMSWVRRAPGKGLEWV |
| ScFv domain | | SGIVYSGSTYYAASVKGRFTISRDNSRNTLYLQMNSLRPEDTAIYYCS |
| | | AHGGESDVWGQGTTVTVSSASGGGGSGGRASGGGGSEIVLTQSPGTLS |
| | | LSPGERATLSCRASQSIGSSSLAWYQQKPGQAPRLLMYGASSRASGIP |
| | | DRFSGSGSGTDFTLTISRLEPEDFAVYYCQQYAGSPPFTFGQGTKVEI |
| | | K |
| 139114-nt | 1052 | GAAGTGCAATTGGTGGAATCTGGTGGAGGACTTGTGCAACCTGGAGGA |
| ScFv domain | | TCACTGAGACTGTCATGCGCGGTGTCCGGTTTTGCCCTGAGCAATCAT |
| | | GGGATGTCGTGGGTCCGGCGCGCCCCCGGAAAGGGTCTGGAATGGGTG |
| | | TCGGGTATCGTCTACTCCGGGAGCACTTACTACGCCGCGAGCGTGAAG |
| | | GGCCGCTTCACCATTTCCCGCGATAACTCCCGCAACACCCTGTACTTG |
| | | CAAATGAACTCGCTCCGGCCTGAGGACACTGCCATCTACTACTGCTCC |
| | | GCACACGGAGGAGAATCCGACGTGTGGGGCCAGGGAACTACCGTGACC |
| | | GTCAGCAGCGCCTCCGGCGGCGGGGGCTCAGGCGGACGGGCTAGCGGC |
| | | GGCGGTGGCTCCGAGATCGTGCTGACCCAGTCGCCTGGCACTCTCTCG |
| | | CTGAGCCCCGGGGAAAGGGCAACCCTGTCCTGTCGGGCCAGCCAGTCC |
| | | ATTGGATCATCCTCCCTCGCCTGGTATCAGCAGAAACCGGGACAGGCT |
| | | CCGCGGCTGCTTATGTATGGGGCCAGCTCAAGAGCCTCCGGCATTCCC |
| | | GACCGGTTCTCCGGGTCCGGTTCCGGCACCGATTTCACCCTGACTATC |
| | | TCGAGGCTGGAGCCAGAGGACTTCGCCGTGTACTACTGCCAGCAGTAC |
| | | GCGGGGTCCCCGCCGTTCACGTTCGGACAGGGAACCAAGGTCGAGATC |
| | | AAG |
| 139114-aa | 1053 | EVQLVESGGGLVQPGGSLRLSCAVSGFALSNHGMSWVRRAPGKGLEWV |
| VH | | SGIVYSGSTYYAASVKGRFTISRDNSRNTLYLQMNSLRPEDTAIYYCS |
| | | AHGGESDVWGQGTTVTVSS |
| 139114-aa | 1054 | EIVLTQSPGTLSLSPGERATLSCRASQSIGSSSLAWYQQKPGQAPRLL |
| VL | | MYGASSRASGIPDRFSGSGSGTDFTLTISRLEPEDFAVYYCQQYAGSP |
| | | PFTFGQGTKVEIK |
| 139114-aa | 1055 | MALPVTALLLPLALLLHAARPEVQLVESGGGLVQPGGSLRLSCAVSGF |
| Full CAR | | ALSNHGMSWVRRAPGKGLEWVSGIVYSGSTYYAASVKGRFTISRDNSR |
| | | NTLYLQMNSLRPEDTAIYYCSAHGGESDVWGQGTTVTVSSASGGGGSG |
| | | GRASGGGGSEIVLTQSPGTLSLSPGERATLSCRASQSIGSSSLAWYQQ |
| | | KPGQAPRLLMYGASSRASGIPDRFSGSGSGTDFTLTISRLEPEDFAVY |
| | | YCQQYAGSPPFTFGQGTKVEIKTTTPAPRPPTPAPTIASQPLSLRPEA |
| | | CRPAAGGAVHTRGLDFACDIYIWAPLAGTCGVLLLSLVITLYCKRGRK |
| | | KLLYIFKQPFMRPVQTTQEEDGCSCRFPEEEEGGCELRVKFSRSADAP |
| | | AYKQGQNQLYNELNLGRREEYDVLDKRRGRDPEMGGKPRRKNPQEGLY |
| | | NELQKDKMAEAYSEIGMKGERRRGKGHDGLYQGLSTATKDTYDALHMQ |
| | | ALPPR |
| 139114-nt | 1056 | ATGGCCCTCCCTGTCACCGCCCTGCTGCTTCCGCTGGCTCTTCTGCTC |
| Full CAR | | CACGCCGCTCGGCCCGAAGTGCAATTGGTGGAATCTGGTGGAGGACTT |
| | | GTGCAACCTGGAGGATCACTGAGACTGTCATGCGCGGTGTCCGGTTTT |
| | | GCCCTGAGCAATCATGGGATGTCGTGGGTCCGGCGCGCCCCCGGAAAG |
| | | GGTCTGGAATGGGTGTCGGGTATCGTCTACTCCGGGAGCACTTACTAC |
| | | GCCGCGAGCGTGAAGGGCCGCTTCACCATTTCCCGCGATAACTCCCGC |
| | | AACACCCTGTACTTGCAAATGAACTCGCTCCGGCCTGAGGACACTGCC |
| | | ATCTACTACTGCTCCGCACACGGAGGAGAATCCGACGTGTGGGGCCAG |
| | | GGAACTACCGTGACCGTCAGCAGCGCCTCCGGCGGCGGGGGCTCAGGC |
| | | GGACGGGCTAGCGGCGGCGGTGGCTCCGAGATCGTGCTGACCCAGTCG |
| | | CCTGGCACTCTCTCGCTGAGCCCCGGGGAAAGGGCAACCCTGTCCTGT |
| | | CGGGCCAGCCAGTCCATTGGATCATCCTCCCTCGCCTGGTATCAGCAG |
| | | AAACCGGGACAGGCTCCGCGGCTGCTTATGTATGGGGCCAGCTCAAGA |
| | | GCCTCCGGCATTCCCGACCGGTTCTCCGGGTCCGGTTCCGGCACCGAT |
| | | TTCACCCTGACTATCTCGAGGCTGGAGCCAGAGGACTTCGCCGTGTAC |
| | | TACTGCCAGCAGTACGCGGGGTCCCCGCCGTTCACGTTCGGACAGGGA |
| | | ACCAAGGTCGAGATCAAGACCACTACCCCAGCACCGAGGCCACCCACC |
| | | CCGGCTCCTACCATCGCCTCCCAGCCTCTGTCCCTGCGTCCGGAGGCA |
| | | TGTAGACCCGCAGCTGGTGGGGCCGTGCATACCCGGGGTCTTGACTTC |
| | | GCCTGCGATATCTACATTTGGGCCCCTCTGGCTGGTACTTGCGGGGTC |
| | | CTGCTGCTTTCACTCGTGATCACTCTTTACTGTAAGCGCGGTCGGAAG |
| | | AAGCTGCTGTACATCTTTAAGCAACCCTTCATGAGGCCTGTGCAGACT |
| | | ACTCAAGAGGAGGACGGCTGTTCATGCCGGTTCCCAGAGGAGGAGGAA |
| | | GGCGGCTGCGAACTGCGCGTGAAATTCAGCCGCAGCGCAGATGCTCCA |
| | | GCCTACAAGCAGGGGCAGAACCAGCTCTACAACGAACTCAATCTTGGT |
| | | CGGAGAGAGGAGTACGACGTGCTGGACAAGCGGAGAGGACGGGACCCA |
| | | GAAATGGGCGGGAAGCCGCGCAGAAAGAATCCCCAAGAGGGCCTGTAC |
| | | AACGAGCTCCAAAAGGATAAGATGGCAGAAGCCTATAGCGAGATTGGT |
| | | ATGAAAGGGGAACGCAGAAGAGGCAAAGGCCACGACGGACTGTACCAG |
| | | GGACTCAGCACCGCCACCAAGGACACCTATGACGCTCTTCACATGCAG |
| | | GCCCTGCCGCCTCGG |

149362

| | | |
|---|---|---|
| 149362-aa | 1057 | QVQLQESGPGLVKPSETLSLTCTVSGGSISSSYYYWGWIRQPPGKGLE |
| ScFv domain | | WIGSIYYSGSAYYNPSLKSRVTISVDTSKNQFSLRLSSVTAADTAVYY |
| | | CARHWQEWPDAFDIWGQGTMVTVSSGGGGSGGGGSGGGGSETTLTQSP |
| | | AFMSATPGDKVIISCKASQDIDDAMNWYQQKPGEAPLFIIQSATSPVP |
| | | GIPPRFSGSGFGTDFSLTINNIESEDAAYYFCLQHDNFPLTFGQGTKL |
| | | EIK |
| 149362-nt | 1058 | CAAGTGCAGCTTCAGGAAAGCGGACCGGGCCTGGTCAAGCCATCCGAA |
| ScFv domain | | ACTCTCTCCCTGACTTGCACTGTGTCTGGCGGTTCCATCTCATCGTCG |
| | | TACTACTACTGGGGCTGGATTAGGCAGCCGCCCGGAAAGGGACTGGAG |
| | | TGGATCGGAAGCATCTACTATTCCGGCTCGGCGTACTACAACCCTAGC |
| | | CTCAAGTCGAGAGTGACCATCTCCGTGGATACCTCCAAGAACCAGTTT |
| | | TCCCTGCGCCTGAGCTCCGTGACCGCCGCTGACACCGCCGTGTACTAC |
| | | TGTGCTCGGCATTGGCAGGAATGGCCCGATGCCTTCGACATTTGGGGC |
| | | CAGGGCACTATGGTCACTGTGTCATCCGGGGGTGGAGGCAGCGGGGGA |
| | | GGAGGGTCCGGGGGGGGAGGTTCAGAGACAACCTTGACCCAGTCACCC |
| | | GCATTCATGTCCGCCACTCCGGGAGACAAGGTCATCATCTCGTGCAAA |
| | | GCGTCCCAGGATATCGACGATGCCATGAATTGGTACCAGCAGAAGCCT |
| | | GGCGAAGCGCCGCTGTTCATTATCCAATCCGCAACCTCGCCCGTGCCT |
| | | GGAATCCCACCGCGGTTCAGCGGCAGCGGTTTCGGAACCGACTTTTCC |
| | | CTGACCATTAACAACATTGAGTCCGAGGACGCCGCCTACTACTTCTGC |
| | | CTGCAACACGACAACTTCCCTCTCACGTTCGGCCAGGGAACCAAGCTG |
| | | GAAATCAAG |
| 149362-aa | 1059 | QVQLQESGPGLVKPSETLSLTCTVSGGSISSSYYYWGWIRQPPGKGLE |
| VH | | WIGSIYYSGSAYYNPSLKSRVTISVDTSKNQFSLRLSSVTAADTAVYY |
| | | CARHWQEWPDAFDIWGQGTMVTVSS |
| 149362-aa | 1060 | ETTLTQSPAFMSATPGDKVIISCKASQDIDDAMNWYQQKPGEAPLFII |
| VL | | QSATSPVPGIPPRFSGSGFGTDFSLTINNIESEDAAYYFCLQHDNFPL |
| | | TFGQGTKLEIK |
| 149362-aa | 1061 | MALPVTALLLPLALLLHAARPQVQLQESGPGLVKPSETLSLTCTVSGG |
| Full CAR | | SISSSYYYWGWIRQPPGKGLEWIGSIYYSGSAYYNPSLKSRVTISVDT |
| | | SKNQFSLRLSSVTAADTAVYYCARHWQEWPDAFDIWGQGTMVTVSSGG |
| | | GGSGGGGSGGGGSETTLTQSPAFMSATPGDKVIISCKASQDIDDAMNW |
| | | YQQKPGEAPLFIIQSATSPVPGIPPRFSGSGFGTDFSLTINNIESEDA |
| | | AYYFCLQHDNFPLTFGQGTKLEIKTTTPAPRPPTPAPTIASQPLSLRP |
| | | EACRPAAGGAVHTRGLDFACDIYIWAPLAGTCGVLLLSLVITLYCKRG |
| | | RKKLLYIFKQPFMRPVQTTQEEDGCSCRFPEEEEGGCELRVKFSRSAD |
| | | APAYKQGQNQLYNELNLGRREEYDVLDKRRGRDPEMGGKPRRKNPQEG |
| | | LYNELQKDKMAEAYSEIGMKGERRRGKGHDGLYQGLSTATKDTYDALH |
| | | MQALPPR |
| 149362-nt | 1062 | ATGGCCCTCCCTGTCACCGCCCTGCTGCTTCCGCTGGCTCTTCTGCTC |
| Full CAR | | CACGCCGCTCGGCCCCAAGTGCAGCTTCAGGAAAGCGGACCGGGCCTG |
| | | GTCAAGCCATCCGAAACTCTCTCCCTGACTTGCACTGTGTCTGGCGGT |
| | | TCCATCTCATCGTCGTACTACTACTGGGGCTGGATTAGGCAGCCGCCC |
| | | GGAAAGGGACTGGAGTGGATCGGAAGCATCTACTATTCCGGCTCGGCG |
| | | TACTACAACCCTAGCCTCAAGTCGAGAGTGACCATCTCCGTGGATACC |
| | | TCCAAGAACCAGTTTTCCCTGCGCCTGAGCTCCGTGACCGCCGCTGAC |
| | | ACCGCCGTGTACTACTGTGCTCGGCATTGGCAGGAATGGCCCGATGCC |
| | | TTCGACATTTGGGGCCAGGGCACTATGGTCACTGTGTCATCCGGGGGT |
| | | GGAGGCAGCGGGGGAGGAGGGTCCGGGGGGGGAGGTTCAGAGACAACC |
| | | TTGACCCAGTCACCCGCATTCATGTCCGCCACTCCGGGAGACAAGGTC |
| | | ATCATCTCGTGCAAAGCGTCCCAGGATATCGACGATGCCATGAATTGG |
| | | TACCAGCAGAAGCCTGGCGAAGCGCCGCTGTTCATTATCCAATCCGCA |
| | | ACCTCGCCCGTGCCTGGAATCCCACCGCGGTTCAGCGGCAGCGGTTTC |
| | | GGAACCGACTTTTCCCTGACCATTAACAACATTGAGTCCGAGGACGCC |
| | | GCCTACTACTTCTGCCTGCAACACGACAACTTCCCTCTCACGTTCGGC |
| | | CAGGGAACCAAGCTGGAAATCAAGACCACTACCCCAGCACCGAGGCCA |
| | | CCCACCCCGGCTCCTACCATCGCCTCCCAGCCTCTGTCCCTGCGTCCG |
| | | GAGGCATGTAGACCCGCAGCTGGTGGGGCCGTGCATACCCGGGGTCTT |
| | | GACTTCGCCTGCGATATCTACATTTGGGCCCCTCTGGCTGGTACTTGC |
| | | GGGGTCCTGCTGCTTTCACTCGTGATCACTCTTTACTGTAAGCGCGGT |
| | | CGGAAGAAGCTGCTGTACATCTTTAAGCAACCCTTCATGAGGCCTGTG |
| | | CAGACTACTCAAGAGGAGGACGGCTGTTCATGCCGGTTCCCAGAGGAG |
| | | GAGGAAGGCGGCTGCGAACTGCGCGTGAAATTCAGCCGCAGCGCAGAT |
| | | GCTCCAGCCTACAAGCAGGGGCAGAACCAGCTCTACAACGAACTCAAT |
| | | CTTGGTCGGAGAGAGGAGTACGACGTGCTGGACAAGCGGAGAGGACGG |
| | | GACCCAGAAATGGGCGGGAAGCCGCGCAGAAAGAATCCCCAAGAGGGC |
| | | CTGTACAACGAGCTCCAAAAGGATAAGATGGCAGAAGCCTATAGCGAG |
| | | ATTGGTATGAAAGGGGAACGCAGAAGAGGCAAAGGCCACGACGGACTG |
| | | TACCAGGGACTCAGCACCGCCACCAAGGACACCTATGACGCTCTTCAC |
| | | ATGCAGGCCCTGCCGCCTCGG |

149363

| | | |
|---|---|---|
| 149363-aa | 1063 | VNLRESGPALVKPTQTLTLTCTFSGFSLRTSGMCVSWIRQPPGKALEW |
| ScFv domain | | LARIDWDEDKFYSTSLKTRLTISKDTSDNQVVLRMTNMDPADTATYYC |
| | | ARSGAGGTSATAFDIWGPGTMVTVSSGGGGSGGGGSGGGGSDIQMTQS |
| | | PSSLSASVGDRVTITCRASQDIYNNLAWFQLKPGSAPRSLMYAANKSQ |
| | | SGVPSRFSGSASGTDFTLTISSLQPEDFATYYCQHYYRFPYSFGQGTK |
| | | LEIK |
| 149363-nt | 1064 | CAAGTCAATCTGCGCGAATCCGGCCCCGCCTTGGTCAAGCCTACCCAG |
| ScFv domain | | ACCCTCACTCTGACCTGTACTTTCTCCGGCTTCTCCCTGCGGACTTCC |
| | | GGGATGTGCGTGTCCTGGATCAGACAGCCTCCGGGAAAGGCCCTGGAG |
| | | TGGCTCGCTCGCATTGACTGGGATGAGGACAAGTTCTACTCCACCTCA |
| | | CTCAAGACCAGGCTGACCATCAGCAAAGATACCTCTGACAACCAAGTG |
| | | GTGCTCCGCATGACCAACATGGACCCAGCCGACACTGCCACTTACTAC |
| | | TGCGCGAGGAGCGGAGCGGGCGGAACCTCCGCCACCGCCTTCGATATT |
| | | TGGGGCCCGGGTACCATGGTCACCGTGTCAAGCGGAGGAGGGGGGTCC |
| | | GGGGGCGGCGGTTCCGGGGGAGGCGGATCGGACATTCAGATGACTCAG |
| | | TCACCATCGTCCCTGAGCGCTAGCGTGGGCGACAGAGTGACAATCACT |
| | | TGCCGGGCATCCCAGGACATCTATAACAACCTTGCGTGGTTCCAGCTG |
| | | AAGCCTGGTTCCGCACCGCGGTCACTTATGTACGCCGCCAACAAGAGC |
| | | CAGTCGGGAGTGCCGTCCCGGTTTTCCGGTTCGGCCTCGGGAACTGAC |
| | | TTCACCCTGACGATCTCCAGCCTGCAACCCGAGGATTTCGCCACCTAC |
| | | TACTGCCAGCACTACTACCGCTTTCCCTACTCGTTCGGACAGGGAACC |
| | | AAGCTGGAAATCAAG |
| 149363-aa | 1065 | QVNLRESGPALVKPTQTLTLTCTFSGFSLRTSGMCVSWIRQPPGKALE |
| VH | | WLARIDWDEDKFYSTSLKTRLTISKDTSDNQVVLRMTNMDPADTATYY |
| | | CARSGAGGTSATAFDIWGPGTMVTVSS |
| 149363-aa | 1066 | DIQMTQSPSSLSASVGDRVTITCRASQDIYNNLAWFQLKPGSAPRSLM |
| VL | | YAANKSQSGVPSRFSGSASGTDFTLTISSLQPEDFATYYCQHYYRFPY |
| | | SFGQGTKLEIK |
| 149363-aa | 1067 | MALPVTALLLPLALLLHAARPQVNLRESGPALVKPTQTLTLTCTFSGF |
| Full CAR | | SLRTSGMCVSWIRQPPGKALEWLARIDWDEDKFYSTSLKTRLTISKDT |
| | | SDNQVVLRMTNMDPADTATYYCARSGAGGTSATAFDIWGPGTMVTVSS |
| | | GGGGSGGGGSGGGGSDIQMTQSPSSLSASVGDRVTITCRASQDIYNNL |
| | | AWFQLKPGSAPRSLMYAANKSQSGVPSRFSGSASGTDFTLTISSLQPE |
| | | DFATYYCQHYYRFPYSFGQGTKLEIKTTTPAPRPPTPAPTIASQPLSL |
| | | RPEACRPAAGGAVHTRGLDFACDIYIWAPLAGTCGVLLLSLVITLYCK |
| | | RGRKKLLYIFKQPFMRPVQTTQEEDGCSCRFPEEEEGGCELRVKFSRS |
| | | ADAPAYKQGQNQLYNELNLGRREEYDVLDKRRGRDPEMGGKPRRKNPQ |
| | | EGLYNELQKDKMAEAYSEIGMKGERRRGKGHDGLYQGLSTATKDTYDA |
| | | LHMQALPPR |
| 149363-nt | 1068 | ATGGCCCTCCCTGTCACCGCCCTGCTGCTTCCGCTGGCTCTTCTGCTC |
| Full CAR | | CACGCCGCTCGGCCCCAAGTCAATCTGCGCGAATCCGGCCCCGCCTTG |
| | | GTCAAGCCTACCCAGACCCTCACTCTGACCTGTACTTTCTCCGGCTTC |
| | | TCCCTGCGGACTTCCGGGATGTGCGTGTCCTGGATCAGACAGCCTCCG |
| | | GGAAAGGCCCTGGAGTGGCTCGCTCGCATTGACTGGGATGAGGACAAG |
| | | TTCTACTCCACCTCACTCAAGACCAGGCTGACCATCAGCAAAGATACC |
| | | TCTGACAACCAAGTGGTGCTCCGCATGACCAACATGGACCCAGCCGAC |
| | | ACTGCCACTTACTACTGCGCGAGGAGCGGAGCGGGCGGAACCTCCGCC |
| | | ACCGCCTTCGATATTTGGGGCCCGGGTACCATGGTCACCGTGTCAAGC |
| | | GGAGGAGGGGGGTCCGGGGGCGGCGGTTCCGGGGGAGGCGGATCGGAC |
| | | ATTCAGATGACTCAGTCACCATCGTCCCTGAGCGCTAGCGTGGGCGAC |
| | | AGAGTGACAATCACTTGCCGGGCATCCCAGGACATCTATAACAACCTT |
| | | GCGTGGTTCCAGCTGAAGCCTGGTTCCGCACCGCGGTCACTTATGTAC |
| | | GCCGCCAACAAGAGCCAGTCGGGAGTGCCGTCCCGGTTTTCCGGTTCG |
| | | GCCTCGGGAACTGACTTCACCCTGACGATCTCCAGCCTGCAACCCGAG |
| | | GATTTCGCCACCTACTACTGCCAGCACTACTACCGCTTTCCCTACTCG |
| | | TTCGGACAGGGAACCAAGCTGGAAATCAAGACCACTACCCCAGCACCG |
| | | AGGCCACCCACCCCGGCTCCTACCATCGCCTCCCAGCCTCTGTCCCTG |
| | | CGTCCGGAGGCATGTAGACCCGCAGCTGGTGGGGCCGTGCATACCCGG |
| | | GGTCTTGACTTCGCCTGCGATATCTACATTTGGGCCCCTCTGGCTGGT |
| | | ACTTGCGGGGTCCTGCTGCTTTCACTCGTGATCACTCTTTACTGTAAG |
| | | CGCGGTCGGAAGAAGCTGCTGTACATCTTTAAGCAACCCTTCATGAGG |
| | | CCTGTGCAGACTACTCAAGAGGAGGACGGCTGTTCATGCCGGTTCCCA |
| | | GAGGAGGAGGAAGGCGGCTGCGAACTGCGCGTGAAATTCAGCCGCAGC |
| | | GCAGATGCTCCAGCCTACAAGCAGGGGCAGAACCAGCTCTACAACGAA |
| | | CTCAATCTTGGTCGGAGAGAGGAGTACGACGTGCTGGACAAGCGGAGA |
| | | GGACGGGACCCAGAAATGGGCGGGAAGCCGCGCAGAAAGAATCCCCAA |
| | | GAGGGCCTGTACAACGAGCTCCAAAAGGATAAGATGGCAGAAGCCTAT |
| | | AGCGAGATTGGTATGAAAGGGGAACGCAGAAGAGGCAAAGGCCACGAC |
| | | GGACTGTACCAGGGACTCAGCACCGCCACCAAGGACACCTATGACGCT |
| | | CTTCACATGCAGGCCCTGCCGCCTCGG |

149364

| | | |
|---|---|---|
| 149364-aa | 1069 | EVQLVESGGGLVKPGGSLRLSCAASGFTFSSYSMNWVRQAPGKGLEWV |
| ScFv domain | | SSISSSSSYIYYADSVKGRFTISRDNAKNSLYLQMNSLRAEDTAVYYC |
| | | AKTIAAVYAFDIWGQGTTVTVSSGGGGSGGGGSGGGGSEIVLTQSPLS |
| | | LPVTPEEPASISCRSSQSLLHSNGYNYLDWYLQKPGQSPQLLIYLGSN |
| | | RASGVPDRFSGSGSGTDFTLKISRVEAEDVGVYYCMQALQTPYTFGQG |
| | | TKLEIK |
| 149364-nt | 1070 | GAAGTGCAGCTTGTCGAATCCGGGGGGGGACTGGTCAAGCCGGGCGGA |
| ScFv domain | | TCACTGAGACTGTCCTGCGCCGCGAGCGGCTTCACGTTCTCCTCCTAC |
| | | TCCATGAACTGGGTCCGCCAAGCCCCCGGGAAGGGACTGGAATGGGTG |
| | | TCCTCTATCTCCTCGTCGTCGTCCTACATCTACTACGCCGACTCCGTG |
| | | AAGGGAAGATTCACCATTTCCCGCGACAACGCAAAGAACTCACTGTAC |
| | | TTGCAAATGAACTCACTCCGGGCCGAAGATACTGCTGTGTACTATTGC |
| | | GCCAAGACTATTGCCGCCGTCTACGCTTTCGACATCTGGGGCCAGGGA |
| | | ACCACCGTGACTGTGTCGTCCGGTGGTGGTGGCTCGGGCGGAGGAGGA |
| | | AGCGGCGGCGGGGGGTCCGAGATTGTGCTGACCCAGTCGCCACTGAGC |
| | | CTCCCTGTGACCCCCGAGGAACCCGCCAGCATCAGCTGCCGGTCCAGC |
| | | CAGTCCCTGCTCCACTCCAACGGATACAATTACCTCGATTGGTACCTT |
| | | CAGAAGCCTGGACAAAGCCCGCAGCTGCTCATCTACTTGGGATCAAAC |
| | | CGCGCGTCAGGAGTGCCTGACCGGTTCTCCGGCTCGGGCAGCGGTACC |
| | | GATTTCACCCTGAAAATCTCCAGGGTGGAGGCAGAGGACGTGGGAGTG |
| | | TATTACTGTATGCAGGCGCTGCAGACTCCGTACACATTTGGGCAGGGC |
| | | ACCAAGCTGGAGATCAAG |
| 149364-aa | 1071 | EVQLVESGGGLVKPGGSLRLSCAASGFTFSSYSMNWVRQAPGKGLEWV |
| VH | | SSISSSSSYIYYADSVKGRFTISRDNAKNSLYLQMNSLRAEDTAVYYC |
| | | AKTIAAVYAFDIWGQGTTVTVSS |
| 149364-aa | 1072 | EIVLTQSPLSLPVTPEEPASISCRSSQSLLHSNGYNYLDWYLQKPGQS |
| VL | | PQLLIYLGSNRASGVPDRFSGSGSGTDFTLKISRVEAEDVGVYYCMQA |
| | | LQTPYTFGQGTKLEIK |
| 149364-aa | 1073 | MALPVTALLLPLALLLHAARPEVQLVESGGGLVKPGGSLRLSCAASGF |
| Full CAR | | TFSSYSMNWVRQAPGKGLEWVSSISSSSSYIYYADSVKGRFTISRDNA |
| | | KNSLYLQMNSLRAEDTAVYYCAKTIAAVYAFDIWGQGTTVTVSSGGGG |
| | | SGGGGSGGGGSEIVLTQSPLSLPVTPEEPASISCRSSQSLLHSNGYNY |
| | | LDWYLQKPGQSPQLLIYLGSNRASGVPDRFSGSGSGTDFTLKISRVEA |
| | | EDVGVYYCMQALQTPYTFGQGTKLEIKTTTPAPRPPTPAPTIASQPLS |
| | | LRPEACRPAAGGAVHTRGLDFACDIYIWAPLAGTCGVLLLSLVITLYC |
| | | KRGRKKLLYIFKQPFMRPVQTTQEEDGCSCRFPEEEEGGCELRVKFSR |
| | | SADAPAYKQGQNQLYNELNLGRREEYDVLDKRRGRDPEMGGKPRRKNP |
| | | QEGLYNELQKDKMAEAYSEIGMKGERRRGKGHDGLYQGLSTATKDTYD |
| | | ALHMQALPPR |
| 149364-nt | 1074 | ATGGCCCTCCCTGTCACCGCCCTGCTGCTTCCGCTGGCTCTTCTGCTC |
| Full CAR | | CACGCCGCTCGGCCCGAAGTGCAGCTTGTCGAATCCGGGGGGGGACTG |
| | | GTCAAGCCGGGCGGATCACTGAGACTGTCCTGCGCCGCGAGCGGCTTC |
| | | ACGTTCTCCTCCTACTCCATGAACTGGGTCCGCCAAGCCCCCGGGAAG |
| | | GGACTGGAATGGGTGTCCTCTATCTCCTCGTCGTCGTCCTACATCTAC |
| | | TACGCCGACTCCGTGAAGGGAAGATTCACCATTTCCCGCGACAACGCA |
| | | AAGAACTCACTGTACTTGCAAATGAACTCACTCCGGGCCGAAGATACT |
| | | GCTGTGTACTATTGCGCCAAGACTATTGCCGCCGTCTACGCTTTCGAC |
| | | ATCTGGGGCCAGGGAACCACCGTGACTGTGTCGTCCGGTGGTGGTGGC |
| | | TCGGGCGGAGGAGGAAGCGGCGGCGGGGGGTCCGAGATTGTGCTGACC |
| | | CAGTCGCCACTGAGCCTCCCTGTGACCCCCGAGGAACCCGCCAGCATC |
| | | AGCTGCCGGTCCAGCCAGTCCCTGCTCCACTCCAACGGATACAATTAC |
| | | CTCGATTGGTACCTTCAGAAGCCTGGACAAAGCCCGCAGCTGCTCATC |
| | | TACTTGGGATCAAACCGCGCGTCAGGAGTGCCTGACCGGTTCTCCGGC |
| | | TCGGGCAGCGGTACCGATTTCACCCTGAAAATCTCCAGGGTGGAGGCA |
| | | GAGGACGTGGGAGTGTATTACTGTATGCAGGCGCTGCAGACTCCGTAC |
| | | ACATTTGGGCAGGGCACCAAGCTGGAGATCAAGACCACTACCCCAGCA |
| | | CCGAGGCCACCCACCCCGGCTCCTACCATCGCCTCCCAGCCTCTGTCC |
| | | CTGCGTCCGGAGGCATGTAGACCCGCAGCTGGTGGGGCCGTGCATACC |
| | | CGGGGTCTTGACTTCGCCTGCGATATCTACATTTGGGCCCCTCTGGCT |
| | | GGTACTTGCGGGGTCCTGCTGCTTTCACTCGTGATCACTCTTTACTGT |
| | | AAGCGCGGTCGGAAGAAGCTGCTGTACATCTTTAAGCAACCCTTCATG |
| | | AGGCCTGTGCAGACTACTCAAGAGGAGGACGGCTGTTCATGCCGGTTC |
| | | CCAGAGGAGGAGGAAGGCGGCTGCGAACTGCGCGTGAAATTCAGCCGC |
| | | AGCGCAGATGCTCCAGCCTACAAGCAGGGGCAGAACCAGCTCTACAAC |
| | | GAACTCAATCTTGGTCGGAGAGAGGAGTACGACGTGCTGGACAAGCGG |
| | | AGAGGACGGGACCCAGAAATGGGCGGGAAGCCGCGCAGAAAGAATCCC |
| | | CAAGAGGGCCTGTACAACGAGCTCCAAAAGGATAAGATGGCAGAAGCC |
| | | TATAGCGAGATTGGTATGAAAGGGGAACGCAGAAGAGGCAAAGGCCAC |
| | | GACGGACTGTACCAGGGACTCAGCACCGCCACCAAGGACACCTATGAC |
| | | GCTCTTCACATGCAGGCCCTGCCGCCTCGG |

149365

| | | |
|---|---|---|
| 149365-aa | 1075 | EVQLVESGGGLVKPGGSLRLSCAASGFTFSDYYMSWIRQAPGKGLEWV |
| ScFv domain | | SYISSSGSTIYYADSVKGRFTISRDNAKNSLYLQMNSLRAEDTAVYYC |
| | | ARDLRGAFDIWGQGTMVTVSSGGGGSGGGGSGGGGSSYVLTQSPSVSA |
| | | APGYTATISCGGNNIGTKSVHWYQQKPGQAPLLVIRDDSVRPSKIPGR |
| | | FSGSNSGNMATLTISGVQAGDEADFYCQVWDSDSEHVVFGGGTKLTVL |
| 149365-nt | 1076 | GAAGTCCAGCTCGTGGAGTCCGGCGGAGGCCTTGTGAAGCCTGGAGGT |
| ScFv domain | | TCGCTGAGACTGTCCTGCGCCGCCTCCGGCTTCACCTTCTCCGACTAC |
| | | TACATGTCCTGGATCAGACAGGCCCCGGGAAAGGGCCTGGAATGGGTG |
| | | TCCTACATCTCGTCATCGGGCAGCACTATCTACTACGCGGACTCAGTG |
| | | AAGGGGCGGTTCACCATTTCCCGGGATAACGCGAAGAACTCGCTGTAT |
| | | CTGCAAATGAACTCACTGAGGGCCGAGGACACCGCCGTGTACTACTGC |
| | | GCCCGCGATCTCCGCGGGGCATTTGACATCTGGGGACAGGGAACCATG |
| | | GTCACAGTGTCCAGCGGAGGGGGAGGATCGGGTGGCGGAGGTTCCGGG |
| | | GGTGGAGGCTCCTCCTACGTGCTGACTCAGAGCCCAAGCGTCAGCGCT |
| | | GCGCCCGGTTACACGGCAACCATCTCCTGTGGCGGAAACAACATTGGG |
| | | ACCAAGTCTGTGCACTGGTATCAGCAGAAGCCGGGCCAAGCTCCCCTG |
| | | TTGGTGATCCGCGATGACTCCGTGCGGCCTAGCAAAATTCCGGGACGG |
| | | TTCTCCGGCTCCAACAGCGGCAATATGGCCACTCTCACCATCTCGGGA |
| | | GTGCAGGCCGGAGATGAAGCCGACTTCTACTGCCAAGTCTGGGACTCA |
| | | GACTCCGAGCATGTGGTGTTCGGGGGCGGAACCAAGCTGACTGTGCTC |
| 149365-aa | 1077 | EVQLVESGGGLVKPGGSLRLSCAASGFTFSDYYMSWIRQAPGKGLEWV |
| VH | | SYISSSGSTIYYADSVKGRFTISRDNAKNSLYLQMNSLRAEDTAVYYC |
| | | ARDLRGAFDIWGQGTMVTVSS |
| 149365-aa | 1078 | SYVLTQSPSVSAAPGYTATISCGGNNIGTKSVHWYQQKPGQAPLLVIR |
| VL | | DDSVRPSKIPGRFSGSNSGNMATLTISGVQAGDEADFYCQVWDSDSEH |
| | | VVFGGGTKLTVL |
| 149365-aa | 1079 | MALPVTALLLPLALLLHAARPEVQLVESGGGLVKPGGSLRLSCAASGF |
| Full CAR | | TFSDYYMSWIRQAPGKGLEWVSYISSSGSTIYYADSVKGRFTISRDNA |
| | | KNSLYLQMNSLRAEDTAVYYCARDLRGAFDIWGQGTMVTVSSGGGGSG |
| | | GGGSGGGGSSYVLTQSPSVSAAPGYTATISCGGNNIGTKSVHWYQQKP |
| | | GQAPLLVIRDDSVRPSKIPGRFSGSNSGNMATLTISGVQAGDEADFYC |
| | | QVWDSDSEHVVFGGGTKLTVLTTTPAPRPPTPAPTIASQPLSLRPEAC |
| | | RPAAGGAVHTRGLDFACDIYIWAPLAGTCGVLLLSLVITLYCKRGRKK |
| | | LLYIFKQPFMRPVQTTQEEDGCSCRFPEEEEGGCELRVKFSRSADAPA |
| | | YKQGQNQLYNELNLGRREEYDVLDKRRGRDPEMGGKPRRKNPQEGLYN |
| | | ELQKDKMAEAYSEIGMKGERRRGKGHDGLYQGLSTATKDTYDALHMQA |
| | | LPPR |
| 149365-nt | 1080 | ATGGCCCTCCCTGTCACCGCCCTGCTGCTTCCGCTGGCTCTTCTGCTC |
| Full CAR | | CACGCCGCTCGGCCCGAAGTCCAGCTCGTGGAGTCCGGCGGAGGCCTT |
| | | GTGAAGCCTGGAGGTTCGCTGAGACTGTCCTGCGCCGCCTCCGGCTTC |
| | | ACCTTCTCCGACTACTACATGTCCTGGATCAGACAGGCCCCGGGAAAG |
| | | GGCCTGGAATGGGTGTCCTACATCTCGTCATCGGGCAGCACTATCTAC |
| | | TACGCGGACTCAGTGAAGGGGCGGTTCACCATTTCCCGGGATAACGCG |
| | | AAGAACTCGCTGTATCTGCAAATGAACTCACTGAGGGCCGAGGACACC |
| | | GCCGTGTACTACTGCGCCCGCGATCTCCGCGGGGCATTTGACATCTGG |
| | | GGACAGGGAACCATGGTCACAGTGTCCAGCGGAGGGGGAGGATCGGGT |
| | | GGCGGAGGTTCCGGGGGTGGAGGCTCCTCCTACGTGCTGACTCAGAGC |
| | | CCAAGCGTCAGCGCTGCGCCCGGTTACACGGCAACCATCTCCTGTGGC |
| | | GGAAACAACATTGGGACCAAGTCTGTGCACTGGTATCAGCAGAAGCCG |
| | | GGCCAAGCTCCCCTGTTGGTGATCCGCGATGACTCCGTGCGGCCTAGC |
| | | AAAATTCCGGGACGGTTCTCCGGCTCCAACAGCGGCAATATGGCCACT |
| | | CTCACCATCTCGGGAGTGCAGGCCGGAGATGAAGCCGACTTCTACTGC |
| | | CAAGTCTGGGACTCAGACTCCGAGCATGTGGTGTTCGGGGGCGGAACC |
| | | AAGCTGACTGTGCTCACCACTACCCCAGCACCGAGGCCACCCACCCCG |
| | | GCTCCTACCATCGCCTCCCAGCCTCTGTCCCTGCGTCCGGAGGCATGT |
| | | AGACCCGCAGCTGGTGGGGCCGTGCATACCCGGGGTCTTGACTTCGCC |
| | | TGCGATATCTACATTTGGGCCCCTCTGGCTGGTACTTGCGGGGTCCTG |
| | | CTGCTTTCACTCGTGATCACTCTTTACTGTAAGCGCGGTCGGAAGAAG |
| | | CTGCTGTACATCTTTAAGCAACCCTTCATGAGGCCTGTGCAGACTACT |
| | | CAAGAGGAGGACGGCTGTTCATGCCGGTTCCCAGAGGAGGAGGAAGGC |
| | | GGCTGCGAACTGCGCGTGAAATTCAGCCGCAGCGCAGATGCTCCAGCC |
| | | TACAAGCAGGGGCAGAACCAGCTCTACAACGAACTCAATCTTGGTCGG |
| | | AGAGAGGAGTACGACGTGCTGGACAAGCGGAGAGGACGGGACCCAGAA |
| | | ATGGGCGGGAAGCCGCGCAGAAAGAATCCCCAAGAGGGCCTGTACAAC |
| | | GAGCTCCAAAAGGATAAGATGGCAGAAGCCTATAGCGAGATTGGTATG |
| | | AAAGGGGAACGCAGAAGAGGCAAAGGCCACGACGGACTGTACCAGGGA |
| | | CTCAGCACCGCCACCAAGGACACCTATGACGCTCTTCACATGCAGGCC |
| | | CTGCCGCCTCGG |

149366

| | | |
|---|---|---|
| 149366-aa | 1081 | QVQLVQSGAEVKKPGASVKVSCKPSGYTVTSHYIHWVRRAPGQGLEWM |
| ScFv domain | | GMINPSGGVTAYSQTLQGRVTMTSDTSSSTVYMELSSLRSEDTAMYYC |
| | | AREGSGSGWYFDFWGRGTLVTVSSGGGGSGGGGSGGGGSSYVLTQPPS |
| | | VSVSPGQTASITCSGDGLSKKYVSWYQQKAGQSPVVLISRDKERPSGI |
| | | PDRFSGSNSADTATLTISGTQAMDEADYYCQAWDDTTVVFGGGTKLTV |
| | | L |
| 149366-nt | 1082 | CAAGTGCAGCTGGTGCAGAGCGGGGCCGAAGTCAAGAAGCCGGGAGCC |
| ScFv domain | | TCCGTGAAAGTGTCCTGCAAGCCTTCGGGATACACCGTGACCTCCCAC |
| | | TACATTCATTGGGTCCGCCGCGCCCCCGGCCAAGGACTCGAGTGGATG |
| | | GGCATGATCAACCCTAGCGGCGGAGTGACCGCGTACAGCCAGACGCTG |
| | | CAGGGACGCGTGACTATGACCTCGGATACCTCCTCCTCCACCGTCTAT |
| | | ATGGAACTGTCCAGCCTGCGGTCCGAGGATACCGCCATGTACTACTGC |
| | | GCCCGGGAAGGATCAGGCTCCGGGTGGTATTTCGACTTCTGGGGAAGA |
| | | GGCACCCTCGTGACTGTGTCATCTGGGGGAGGGGGTTCCGGTGGTGGC |
| | | GGATCGGGAGGAGGCGGTTCATCCTACGTGCTGACCCAGCCACCCTCC |
| | | GTGTCCGTGAGCCCCGGCCAGACTGCATCGATTACATGTAGCGGCGAC |
| | | GGCCTCTCCAAGAAATACGTGTCGTGGTACCAGCAGAAGGCCGGACAG |
| | | AGCCCGGTGGTGCTGATCTCAAGAGATAAGGAGCGGCCTAGCGGAATC |
| | | CCGGACAGGTTCTCGGGTTCCAACTCCGCGGACACTGCTACTCTGACC |
| | | ATCTCGGGGACCCAGGCTATGGACGAAGCCGATTACTACTGCCAAGCC |
| | | TGGGACGACACTACTGTCGTGTTTGGAGGGGGCACCAAGTTGACCGTC |
| | | CTT |
| 149366-aa | 1083 | QVQLVQSGAEVKKPGASVKVSCKPSGYTVTSHYIHWVRRAPGQGLEWM |
| VH | | GMINPSGGVTAYSQTLQGRVTMTSDTSSSTVYMELSSLRSEDTAMYYC |
| | | AREGSGSGWYFDFWGRGTLVTVSS |
| 149366-aa | 1084 | SYVLTQPPSVSVSPGQTASITCSGDGLSKKYVSWYQQKAGQSPVVLIS |
| VL | | RDKERPSGIPDRFSGSNSADTATLTISGTQAMDEADYYCQAWDDTTVV |
| | | FGGGTKLTVL |
| 149366-aa | 1085 | MALPVTALLLPLALLLHAARPQVQLVQSGAEVKKPGASVKVSCKPSGY |
| Full CAR | | TVTSHYIHWVRRAPGQGLEWMGMINPSGGVTAYSQTLQGRVTMTSDTS |
| | | SSTVYMELSSLRSEDTAMYYCAREGSGSGWYFDFWGRGTLVTVSSGGG |
| | | GSGGGGSGGGGSSYVLTQPPSVSVSPGQTASITCSGDGLSKKYVSWYQ |
| | | QKAGQSPVVLISRDKERPSGIPDRFSGSNSADTATLTISGTQAMDEAD |
| | | YYCQAWDDTTVVFGGGTKLTVLTTTPAPRPPTPAPTIASQPLSLRPEA |
| | | CRPAAGGAVHTRGLDFACDIYIWAPLAGTCGVLLLSLVITLYCKRGRK |
| | | KLLYIFKQPFMRPVQTTQEEDGCSCRFPEEEEGGCELRVKFSRSADAP |
| | | AYKQGQNQLYNELNLGRREEYDVLDKRRGRDPEMGGKPRRKNPQEGLY |
| | | NELQKDKMAEAYSEIGMKGERRRGKGHDGLYQGLSTATKDTYDALHMQ |
| | | ALPPR |
| 149366-nt | 1086 | ATGGCCCTCCCTGTCACCGCCCTGCTGCTTCCGCTGGCTCTTCTGCTC |
| Full CAR | | CACGCCGCTCGGCCCCAAGTGCAGCTGGTGCAGAGCGGGGCCGAAGTC |
| | | AAGAAGCCGGGAGCCTCCGTGAAAGTGTCCTGCAAGCCTTCGGGATAC |
| | | ACCGTGACCTCCCACTACATTCATTGGGTCCGCCGCGCCCCCGGCCAA |
| | | GGACTCGAGTGGATGGGCATGATCAACCCTAGCGGCGGAGTGACCGCG |
| | | TACAGCCAGACGCTGCAGGGACGCGTGACTATGACCTCGGATACCTCC |
| | | TCCTCCACCGTCTATATGGAACTGTCCAGCCTGCGGTCCGAGGATACC |
| | | GCCATGTACTACTGCGCCCGGGAAGGATCAGGCTCCGGGTGGTATTTC |
| | | GACTTCTGGGGAAGAGGCACCCTCGTGACTGTGTCATCTGGGGGAGGG |
| | | GGTTCCGGTGGTGGCGGATCGGGAGGAGGCGGTTCATCCTACGTGCTG |
| | | ACCCAGCCACCCTCCGTGTCCGTGAGCCCCGGCCAGACTGCATCGATT |
| | | ACATGTAGCGGCGACGGCCTCTCCAAGAAATACGTGTCGTGGTACCAG |
| | | CAGAAGGCCGGACAGAGCCCGGTGGTGCTGATCTCAAGAGATAAGGAG |
| | | CGGCCTAGCGGAATCCCGGACAGGTTCTCGGGTTCCAACTCCGCGGAC |
| | | ACTGCTACTCTGACCATCTCGGGGACCCAGGCTATGGACGAAGCCGAT |
| | | TACTACTGCCAAGCCTGGGACGACACTACTGTCGTGTTTGGAGGGGGC |
| | | ACCAAGTTGACCGTCCTTACCACTACCCCAGCACCGAGGCCACCCACC |
| | | CCGGCTCCTACCATCGCCTCCCAGCCTCTGTCCCTGCGTCCGGAGGCA |
| | | TGTAGACCCGCAGCTGGTGGGGCCGTGCATACCCGGGGTCTTGACTTC |
| | | GCCTGCGATATCTACATTTGGGCCCCTCTGGCTGGTACTTGCGGGGTC |
| | | CTGCTGCTTTCACTCGTGATCACTCTTTACTGTAAGCGCGGTCGGAAG |
| | | AAGCTGCTGTACATCTTTAAGCAACCCTTCATGAGGCCTGTGCAGACT |
| | | ACTCAAGAGGAGGACGGCTGTTCATGCCGGTTCCCAGAGGAGGAGGAA |
| | | GGCGGCTGCGAACTGCGCGTGAAATTCAGCCGCAGCGCAGATGCTCCA |
| | | GCCTACAAGCAGGGGCAGAACCAGCTCTACAACGAACTCAATCTTGGT |
| | | CGGAGAGAGGAGTACGACGTGCTGGACAAGCGGAGAGGACGGGACCCA |
| | | GAAATGGGCGGGAAGCCGCGCAGAAAGAATCCCCAAGAGGGCCTGTAC |
| | | AACGAGCTCCAAAAGGATAAGATGGCAGAAGCCTATAGCGAGATTGGT |
| | | ATGAAAGGGGAACGCAGAAGAGGCAAAGGCCACGACGGACTGTACCAG |
| | | GGACTCAGCACCGCCACCAAGGACACCTATGACGCTCTTCACATGCAG |
| | | GCCCTGCCGCCTCGG |

149367

| | | |
|---|---|---|
| 149367-aa | 1087 | QVQLQESGPGLVKPSQTLSLTCTVSGGSISSGGYYWSWIRQHPGKGLE |
| ScFv domain | | WIGYIYYSGSTYYNPSLKSRVTISVDTSKNQFSLKLSSVTAADTAVYY |
| | | CARAGIAARLRGAFDIWGQGTMVTVSSGGGGSGGGGSGGGGSDIVMTQ |
| | | SPSSVSASVGDRVIITCRASQGIRNWLAWYQQKPGKAPNLLIYAASNL |
| | | QSGVPSRFSGSGSGADFTLTISSLQPEDVATYYCQKYNSAPFTFGPGT |
| | | KVDIK |
| 149367-nt | 1088 | CAAGTGCAGCTTCAGGAGAGCGGCCCGGGACTCGTGAAGCCGTCCCAG |
| ScFv domain | | ACCCTGTCCCTGACTTGCACCGTGTCGGGAGGAAGCATCTCGAGCGGA |
| | | GGCTACTATTGGTCGTGGATTCGGCAGCACCCTGGAAAGGGCCTGGAA |
| | | TGGATCGGCTACATCTACTACTCCGGCTCGACCTACTACAACCCATCG |
| | | CTGAAGTCCAGAGTGACAATCTCAGTGGACACGTCCAAGAATCAGTTC |
| | | AGCCTGAAGCTCTCTTCCGTGACTGCGGCCGACACCGCCGTGTACTAC |
| | | TGCGCACGCGCTGGAATTGCCGCCCGGCTGAGGGGTGCCTTCGACATT |
| | | TGGGGACAGGGCACCATGGTCACCGTGTCCTCCGGCGGCGGAGGTTCC |
| | | GGGGGTGGAGGCTCAGGAGGAGGGGGGTCCGACATCGTCATGACTCAG |
| | | TCGCCCTCAAGCGTCAGCGCGTCCGTCGGGGACAGAGTGATCATCACC |
| | | TGTCGGGCGTCCCAGGGAATTCGCAACTGGCTGGCCTGGTATCAGCAG |
| | | AAGCCCGGAAAGGCCCCCAACCTGTTGATCTACGCCGCCTCAAACCTC |
| | | CAATCCGGGGTGCCGAGCCGCTTCAGCGGCTCCGGTTCGGGTGCCGAT |
| | | TTCACTCTGACCATCTCCTCCCTGCAACCTGAAGATGTGGCTACCTAC |
| | | TACTGCCAAAAGTACAACTCCGCACCTTTTACTTTCGGACCGGGGACC |
| | | AAAGTGGACATTAAG |
| 149367-aa | 1089 | QVQLQESGPGLVKPSQTLSLTCTVSGGSISSGGYYWSWIRQHPGKGLE |
| VH | | WIGYIYYSGSTYYNPSLKSRVTISVDTSKNQFSLKLSSVTAADTAVYY |
| | | CARAGIAARLRGAFDIWGQGTMVTVSS |
| 149367-aa | 1090 | DIVMTQSPSSVSASVGDRVIITCRASQGIRNWLAWYQQKPGKAPNLLI |
| VL | | YAASNLQSGVPSRFSGSGSGADFTLTISSLQPEDVATYYCQKYNSAPF |
| | | TFGPGTKVDIK |
| 149367-aa | 1091 | MALPVTALLLPLALLLHAARPQVQLQESGPGLVKPSQTLSLTCTVSGG |
| Full CAR | | SISSGGYYWSWIRQHPGKGLEWIGYIYYSGSTYYNPSLKSRVTISVDT |
| | | SKNQFSLKLSSVTAADTAVYYCARAGIAARLRGAFDIWGQGTMVTVSS |
| | | GGGGSGGGGSGGGGSDIVMTQSPSSVSASVGDRVIITCRASQGIRNWL |
| | | AWYQQKPGKAPNLLIYAASNLQSGVPSRFSGSGSGADFTLTISSLQPE |
| | | DVATYYCQKYNSAPFTFGPGTKVDIKTTTPAPRPPTPAPTIASQPLSL |
| | | RPEACRPAAGGAVHTRGLDFACDIYIWAPLAGTCGVLLLSLVITLYCK |
| | | RGRKKLLYIFKQPFMRPVQTTQEEDGCSCRFPEEEEGGCELRVKFSRS |
| | | ADAPAYKQGQNQLYNELNLGRREEYDVLDKRRGRDPEMGGKPRRKNPQ |
| | | EGLYNELQKDKMAEAYSEIGMKGERRRGKGHDGLYQGLSTATKDTYDA |
| | | LHMQALPPR |
| 149367-nt | 1092 | ATGGCCCTCCCTGTCACCGCCCTGCTGCTTCCGCTGGCTCTTCTGCTC |
| Full CAR | | CACGCCGCTCGGCCCCAAGTGCAGCTTCAGGAGAGCGGCCCGGGACTC |
| | | GTGAAGCCGTCCCAGACCCTGTCCCTGACTTGCACCGTGTCGGGAGGA |
| | | AGCATCTCGAGCGGAGGCTACTATTGGTCGTGGATTCGGCAGCACCCT |
| | | GGAAAGGGCCTGGAATGGATCGGCTACATCTACTACTCCGGCTCGACC |
| | | TACTACAACCCATCGCTGAAGTCCAGAGTGACAATCTCAGTGGACACG |
| | | TCCAAGAATCAGTTCAGCCTGAAGCTCTCTTCCGTGACTGCGGCCGAC |
| | | ACCGCCGTGTACTACTGCGCACGCGCTGGAATTGCCGCCCGGCTGAGG |
| | | GGTGCCTTCGACATTTGGGGACAGGGCACCATGGTCACCGTGTCCTCC |
| | | GGCGGCGGAGGTTCCGGGGGTGGAGGCTCAGGAGGAGGGGGGTCCGAC |
| | | ATCGTCATGACTCAGTCGCCCTCAAGCGTCAGCGCGTCCGTCGGGGAC |
| | | AGAGTGATCATCACCTGTCGGGCGTCCCAGGGAATTCGCAACTGGCTG |
| | | GCCTGGTATCAGCAGAAGCCCGGAAAGGCCCCCAACCTGTTGATCTAC |
| | | GCCGCCTCAAACCTCCAATCCGGGGTGCCGAGCCGCTTCAGCGGCTCC |
| | | GGTTCGGGTGCCGATTTCACTCTGACCATCTCCTCCCTGCAACCTGAA |
| | | GATGTGGCTACCTACTACTGCCAAAAGTACAACTCCGCACCTTTTACT |
| | | TTCGGACCGGGGACCAAAGTGGACATTAAGACCACTACCCCAGCACCG |
| | | AGGCCACCCACCCCGGCTCCTACCATCGCCTCCCAGCCTCTGTCCCTG |
| | | CGTCCGGAGGCATGTAGACCCGCAGCTGGTGGGGCCGTGCATACCCGG |
| | | GGTCTTGACTTCGCCTGCGATATCTACATTTGGGCCCCTCTGGCTGGT |
| | | ACTTGCGGGGTCCTGCTGCTTTCACTCGTGATCACTCTTTACTGTAAG |
| | | CGCGGTCGGAAGAAGCTGCTGTACATCTTTAAGCAACCCTTCATGAGG |
| | | CCTGTGCAGACTACTCAAGAGGAGGACGGCTGTTCATGCCGGTTCCCA |
| | | GAGGAGGAGGAAGGCGGCTGCGAACTGCGCGTGAAATTCAGCCGCAGC |
| | | GCAGATGCTCCAGCCTACAAGCAGGGGCAGAACCAGCTCTACAACGAA |
| | | CTCAATCTTGGTCGGAGAGAGGAGTACGACGTGCTGGACAAGCGGAGA |
| | | GGACGGGACCCAGAAATGGGCGGGAAGCCGCGCAGAAAGAATCCCCAA |
| | | GAGGGCCTGTACAACGAGCTCCAAAAGGATAAGATGGCAGAAGCCTAT |
| | | AGCGAGATTGGTATGAAAGGGGAACGCAGAAGAGGCAAAGGCCACGAC |
| | | GGACTGTACCAGGGACTCAGCACCGCCACCAAGGACACCTATGACGCT |
| | | CTTCACATGCAGGCCCTGCCGCCTCGG |

149368

| | | |
|---|---|---|
| 149368-aa | 1093 | QVQLVQSGAEVKKPGSSVKVSCKASGGTFSSYAISWVRQAPGQGLEWM |
| ScFv domain | | GGIIPIFGTANYAQKFQGRVTITADESTSTAYMELSSLRSEDTAVYYC |
| | | ARRGGYQLLRWDVGLLRSAFDIWGQGTMVTVSSGGGGSGGGGSGGGGS |
| | | SYVLTQPPSVSVAPGQTARITCGGNNIGSKSVHWYQQKPGQAPVLVLY |
| | | GKNNRPSGVPDRFSGSRSGTTASLTITGAQAEDEADYYCSSRDSSGDH |
| | | LRVFGTGTKVTVL |
| 149368-nt | 1094 | CAAGTGCAGCTGGTCCAGTCGGGCGCCGAGGTCAAGAAGCCCGGGAGC |
| ScFv domain | | TCTGTGAAAGTGTCCTGCAAGGCCTCCGGGGGCACCTTTAGCTCCTAC |
| | | GCCATCTCCTGGGTCCGCCAAGCACCGGGTCAAGGCCTGGAGTGGATG |
| | | GGGGGAATTATCCCTATCTTCGGCACTGCCAACTACGCCCAGAAGTTC |
| | | CAGGGACGCGTGACCATTACCGCGGACGAATCCACCTCCACCGCTTAT |
| | | ATGGAGCTGTCCAGCTTGCGCTCGGAAGATACCGCCGTGTACTACTGC |
| | | GCCCGGAGGGGTGGATACCAGCTGCTGAGATGGGACGTGGGCCTCCTG |
| | | CGGTCGGCGTTCGACATCTGGGGCCAGGGCACTATGGTCACTGTGTCC |
| | | AGCGGAGGAGGCGGATCGGGAGGCGGCGGATCAGGGGGAGGCGGTTCC |
| | | AGCTACGTGCTTACTCAACCCCCTTCGGTGTCCGTGGCCCCGGGACAG |
| | | ACCGCCAGAATCACTTGCGGAGGAAACAACATTGGGTCCAAGAGCGTG |
| | | CATTGGTACCAGCAGAAGCCAGGACAGGCCCCTGTGCTGGTGCTCTAC |
| | | GGGAAGAACAATCGGCCCAGCGGAGTGCCGGACAGGTTCTCGGGTTCA |
| | | CGCTCCGGTACAACCGCTTCACTGACTATCACCGGGGCCCAGGCAGAG |
| | | GATGAAGCGGACTACTACTGTTCCTCCCGGGATTCATCCGGCGACCAC |
| | | CTCCGGGTGTTCGGAACCGGAACGAAGGTCACCGTGCTG |
| 149368-aa | 1095 | QVQLVQSGAEVKKPGSSVKVSCKASGGTFSSYAISWVRQAPGQGLEWM |
| VH | | GGIIPIFGTANYAQKFQGRVTITADESTSTAYMELSSLRSEDTAVYYC |
| | | ARRGGYQLLRWDVGLLRSAFDIWGQGTMVTVSS |
| 149368-aa | 1096 | SYVLTQPPSVSVAPGQTARITCGGNNIGSKSVHWYQQKPGQAPVLVLY |
| VL | | GKNNRPSGVPDRFSGSRSGTTASLTITGAQAEDEADYYCSSRDSSGDH |
| | | LRVFGTGTKVTVL |
| 149368-aa | 1097 | MALPVTALLLPLALLLHAARPQVQLVQSGAEVKKPGSSVKVSCKASGG |
| Full CAR | | TFSSYAISWVRQAPGQGLEWMGGIIPIFGTANYAQKFQGRVTITADES |
| | | TSTAYMELSSLRSEDTAVYYCARRGGYQLLRWDVGLLRSAFDIWGQGT |
| | | MVTVSSGGGGSGGGGSGGGGSSYVLTQPPSVSVAPGQTARITCGGNNI |
| | | GSKSVHWYQQKPGQAPVLVLYGKNNRPSGVPDRFSGSRSGTTASLTIT |
| | | GAQAEDEADYYCSSRDSSGDHLRVFGTGTKVTVLTTTPAPRPPTPAPT |
| | | IASQPLSLRPEACRPAAGGAVHTRGLDFACDIYIWAPLAGTCGVLLLS |
| | | LVITLYCKRGRKKLLYIFKQPFMRPVQTTQEEDGCSCRFPEEEEGGCE |
| | | LRVKFSRSADAPAYKQGQNQLYNELNLGRREEYDVLDKRRGRDPEMGG |
| | | KPRRKNPQEGLYNELQKDKMAEAYSEIGMKGERRRGKGHDGLYQGLST |
| | | ATKDTYDALHMQALPPR |
| 149368-nt | 1098 | ATGGCCCTCCCTGTCACCGCCCTGCTGCTTCCGCTGGCTCTTCTGCTC |
| Full CAR | | CACGCCGCTCGGCCCCAAGTGCAGCTGGTCCAGTCGGGCGCCGAGGTC |
| | | AAGAAGCCCGGGAGCTCTGTGAAAGTGTCCTGCAAGGCCTCCGGGGGC |
| | | ACCTTTAGCTCCTACGCCATCTCCTGGGTCCGCCAAGCACCGGGTCAA |
| | | GGCCTGGAGTGGATGGGGGGAATTATCCCTATCTTCGGCACTGCCAAC |
| | | TACGCCCAGAAGTTCCAGGGACGCGTGACCATTACCGCGGACGAATCC |
| | | ACCTCCACCGCTTATATGGAGCTGTCCAGCTTGCGCTCGGAAGATACC |
| | | GCCGTGTACTACTGCGCCCGGAGGGGTGGATACCAGCTGCTGAGATGG |
| | | GACGTGGGCCTCCTGCGGTCGGCGTTCGACATCTGGGGCCAGGGCACT |
| | | ATGGTCACTGTGTCCAGCGGAGGAGGCGGATCGGGAGGCGGCGGATCA |
| | | GGGGGAGGCGGTTCCAGCTACGTGCTTACTCAACCCCCTTCGGTGTCC |
| | | GTGGCCCCGGGACAGACCGCCAGAATCACTTGCGGAGGAAACAACATT |
| | | GGGTCCAAGAGCGTGCATTGGTACCAGCAGAAGCCAGGACAGGCCCCT |
| | | GTGCTGGTGCTCTACGGGAAGAACAATCGGCCCAGCGGAGTGCCGGAC |
| | | AGGTTCTCGGGTTCACGCTCCGGTACAACCGCTTCACTGACTATCACC |
| | | GGGGCCCAGGCAGAGGATGAAGCGGACTACTACTGTTCCTCCCGGGAT |
| | | TCATCCGGCGACCACCTCCGGGTGTTCGGAACCGGAACGAAGGTCACC |
| | | GTGCTGACCACTACCCCAGCACCGAGGCCACCCACCCCGGCTCCTACC |
| | | ATCGCCTCCCAGCCTCTGTCCCTGCGTCCGGAGGCATGTAGACCCGCA |
| | | GCTGGTGGGGCCGTGCATACCCGGGGTCTTGACTTCGCCTGCGATATC |
| | | TACATTTGGGCCCCTCTGGCTGGTACTTGCGGGGTCCTGCTGCTTTCA |
| | | CTCGTGATCACTCTTTACTGTAAGCGCGGTCGGAAGAAGCTGCTGTAC |
| | | ATCTTTAAGCAACCCTTCATGAGGCCTGTGCAGACTACTCAAGAGGAG |
| | | GACGGCTGTTCATGCCGGTTCCCAGAGGAGGAGGAAGGCGGCTGCGAA |
| | | CTGCGCGTGAAATTCAGCCGCAGCGCAGATGCTCCAGCCTACAAGCAG |
| | | GGGCAGAACCAGCTCTACAACGAACTCAATCTTGGTCGGAGAGAGGAG |
| | | TACGACGTGCTGGACAAGCGGAGAGGACGGGACCCAGAAATGGGCGGG |
| | | AAGCCGCGCAGAAAGAATCCCCAAGAGGGCCTGTACAACGAGCTCCAA |
| | | AAGGATAAGATGGCAGAAGCCTATAGCGAGATTGGTATGAAAGGGGAA |
| | | CGCAGAAGAGGCAAAGGCCACGACGGACTGTACCAGGGACTCAGCACC |
| | | GCCACCAAGGACACCTATGACGCTCTTCACATGCAGGCCCTGCCGCCT |
| | | CGG |

149369

| | | |
|---|---|---|
| 149369-aa | 1099 | EVQLQQSGPGLVKPSQTLSLTCAISGDSVSSNSAAWNWIRQSPSRGLE |
| ScFv domain | | WLGRTYYRSKWYSFYAISLKSRIIINPDTSKNQFSLQLKSVTPEDTAV |
| | | YYCARSSPEGLFLYWFDPWGQGTLVTVSSGGDGSGGGGSGGGGSSSEL |
| | | TQDPAVSVALGQTIRITCQGDSLGNYYATWYQQKPGQAPVLVIYGTNN |
| | | RPSGIPDRFSASSSGNTASLTITGAQAEDEADYYCNSRDSSGHHLLFG |
| | | TGTKVTVL |
| 149369-nt | 1100 | GAAGTGCAGCTCCAACAGTCAGGACCGGGGCTCGTGAAGCCATCCCAG |
| ScFv domain | | ACCCTGTCCCTGACTTGTGCCATCTCGGGAGATAGCGTGTCATCGAAC |
| | | TCCGCCGCCTGGAACTGGATTCGGCAGAGCCCGTCCCGCGGACTGGAG |
| | | TGGCTTGGAAGGACCTACTACCGGTCCAAGTGGTACTCTTTCTACGCG |
| | | ATCTCGCTGAAGTCCCGCATTATCATTAACCCTGATACCTCCAAGAAT |
| | | CAGTTCTCCCTCCAACTGAAATCCGTCACCCCCGAGGACACAGCAGTG |
| | | TATTACTGCGCACGGAGCAGCCCCGAAGGACTGTTCCTGTATTGGTTT |
| | | GACCCCTGGGGCCAGGGGACTCTTGTGACCGTGTCGAGCGGCGGAGAT |
| | | GGGTCCGGTGGCGGTGGTTCGGGGGGCGGCGGATCATCATCCGAACTG |
| | | ACCCAGGACCCGGCTGTGTCCGTGGCGCTGGGACAAACCATCCGCATT |
| | | ACGTGCCAGGGAGACTCCCTGGGCAACTACTACGCCACTTGGTACCAG |
| | | CAGAAGCCGGGCCAAGCCCCTGTGTTGGTCATCTACGGGACCAACAAC |
| | | AGACCTTCCGGCATCCCCGACCGGTTCAGCGCTTCGTCCTCCGGCAAC |
| | | ACTGCCAGCCTGACCATCACTGGAGCGCAGGCCGAAGATGAGGCCGAC |
| | | TACTACTGCAACAGCAGAGACTCCTCGGGTCATCACCTCTTGTTCGGA |
| | | ACTGGAACCAAGGTCACCGTGCTG |
| 149369-aa | 1101 | EVQLQQSGPGLVKPSQTLSLTCAISGDSVSSNSAAWNWIRQSPSRGLE |
| VH | | WLGRTYYRSKWYSFYAISLKSRIIINPDTSKNQFSLQLKSVTPEDTAV |
| | | YYCARSSPEGLFLYWFDPWGQGTLVTVSS |
| 149369-aa | 1102 | SSELTQDPAVSVALGQTIRITCQGDSLGNYYATWYQQKPGQAPVLVIY |
| VL | | GTNNRPSGIPDRFSASSSGNTASLTITGAQAEDEADYYCNSRDSSGHH |
| | | LLFGTGTKVTVL |
| 149369-aa | 1103 | MALPVTALLLPLALLLHAARPEVQLQQSGPGLVKPSQTLSLTCAISGD |
| Full CAR | | SVSSNSAAWNWIRQSPSRGLEWLGRTYYRSKWYSFYAISLKSRIIINP |
| | | DTSKNQFSLQLKSVTPEDTAVYYCARSSPEGLFLYWFDPWGQGTLVTV |
| | | SSGGDGSGGGGSGGGGSSSELTQDPAVSVALGQTIRITCQGDSLGNYY |
| | | ATWYQQKPGQAPVLVIYGTNNRPSGIPDRFSASSSGNTASLTITGAQA |
| | | EDEADYYCNSRDSSGHHLLFGTGTKVTVLTTTPAPRPPTPAPTIASQP |
| | | LSLRPEACRPAAGGAVHTRGLDFACDIYIWAPLAGTCGVLLLSLVITL |
| | | YCKRGRKKLLYIFKQPFMRPVQTTQEEDGCSCRFPEEEEGGCELRVKF |
| | | SRSADAPAYKQGQNQLYNELNLGRREEYDVLDKRRGRDPEMGGKPRRK |
| | | NPQEGLYNELQKDKMAEAYSEIGMKGERRRGKGHDGLYQGLSTATKDT |
| | | YDALHMQALPPR |
| 149369-nt | 1104 | ATGGCCCTCCCTGTCACCGCCCTGCTGCTTCCGCTGGCTCTTCTGCTC |
| Full CAR | | CACGCCGCTCGGCCCGAAGTGCAGCTCCAACAGTCAGGACCGGGGCTC |
| | | GTGAAGCCATCCCAGACCCTGTCCCTGACTTGTGCCATCTCGGGAGAT |
| | | AGCGTGTCATCGAACTCCGCCGCCTGGAACTGGATTCGGCAGAGCCCG |
| | | TCCCGCGGACTGGAGTGGCTTGGAAGGACCTACTACCGGTCCAAGTGG |
| | | TACTCTTTCTACGCGATCTCGCTGAAGTCCCGCATTATCATTAACCCT |
| | | GATACCTCCAAGAATCAGTTCTCCCTCCAACTGAAATCCGTCACCCCC |
| | | GAGGACACAGCAGTGTATTACTGCGCACGGAGCAGCCCCGAAGGACTG |
| | | TTCCTGTATTGGTTTGACCCCTGGGGCCAGGGGACTCTTGTGACCGTG |
| | | TCGAGCGGCGGAGATGGGTCCGGTGGCGGTGGTTCGGGGGGCGGCGGA |
| | | TCATCATCCGAACTGACCCAGGACCCGGCTGTGTCCGTGGCGCTGGGA |
| | | CAAACCATCCGCATTACGTGCCAGGGAGACTCCCTGGGCAACTACTAC |
| | | GCCACTTGGTACCAGCAGAAGCCGGGCCAAGCCCCTGTGTTGGTCATC |
| | | TACGGGACCAACAACAGACCTTCCGGCATCCCCGACCGGTTCAGCGCT |
| | | TCGTCCTCCGGCAACACTGCCAGCCTGACCATCACTGGAGCGCAGGCC |
| | | GAAGATGAGGCCGACTACTACTGCAACAGCAGAGACTCCTCGGGTCAT |
| | | CACCTCTTGTTCGGAACTGGAACCAAGGTCACCGTGCTGACCACTACC |
| | | CCAGCACCGAGGCCACCCACCCCGGCTCCTACCATCGCCTCCCAGCCT |
| | | CTGTCCCTGCGTCCGGAGGCATGTAGACCCGCAGCTGGTGGGGCCGTG |
| | | CATACCCGGGGTCTTGACTTCGCCTGCGATATCTACATTTGGGCCCCT |
| | | CTGGCTGGTACTTGCGGGGTCCTGCTGCTTTCACTCGTGATCACTCTT |
| | | TACTGTAAGCGCGGTCGGAAGAAGCTGCTGTACATCTTTAAGCAACCC |
| | | TTCATGAGGCCTGTGCAGACTACTCAAGAGGAGGACGGCTGTTCATGC |
| | | CGGTTCCCAGAGGAGGAGGAAGGCGGCTGCGAACTGCGCGTGAAATTC |
| | | AGCCGCAGCGCAGATGCTCCAGCCTACAAGCAGGGGCAGAACCAGCTC |
| | | TACAACGAACTCAATCTTGGTCGGAGAGAGGAGTACGACGTGCTGGAC |
| | | AAGCGGAGAGGACGGGACCCAGAAATGGGCGGGAAGCCGCGCAGAAAG |
| | | AATCCCCAAGAGGGCCTGTACAACGAGCTCCAAAAGGATAAGATGGCA |
| | | GAAGCCTATAGCGAGATTGGTATGAAAGGGGAACGCAGAAGAGGCAAA |
| | | GGCCACGACGGACTGTACCAGGGACTCAGCACCGCCACCAAGGACACC |
| | | TATGACGCTCTTCACATGCAGGCCCTGCCGCCTCGG |

BCMA_EBB-C1978-A4

| | | |
|---|---|---|
| BCMA_EBB- | 1105 | EVQLVESGGGLVQPGGSLRLSCAASGFTFSSYAMSWVRQAPGKGLEWV |
| C1978-A4- | | SAISGSGGSTYYADSVKGRFTISRDNSKNTLYLQMNSLRAEDTAVYYC |
| aa | | AKVEGSGSLDYWGQGTLVTVSSGGGGSGGGGSGGGGSEIVMTQSPGTL |
| ScFv domain | | SLSPGERATLSCRASQSVSSAYLAWYQQKPGQPPRLLISGASTRATGI |
| | | PDRFGGSGSGTDFTLTISRLEPEDFAVYYCQHYGSSFNGSSLFTFGQG |
| | | TRLEIK |
| BCMA_EBB- | 1106 | GAAGTGCAGCTCGTGGAGTCAGGAGGCGGCCTGGTCCAGCCGGGAGGG |
| C1978-A4- | | TCCCTTAGACTGTCATGCGCCGCAAGCGGATTCACTTTCTCCTCCTAT |
| nt | | GCCATGAGCTGGGTCCGCCAAGCCCCCGGAAAGGGACTGGAATGGGTG |
| ScFv domain | | TCCGCCATCTCGGGGTCTGGAGGCTCAACTTACTACGCTGACTCCGTG |
| | | AAGGGACGGTTCACCATTAGCCGCGACAACTCCAAGAACACCCTCTAC |
| | | CTCCAAATGAACTCCCTGCGGGCCGAGGATACCGCCGTCTACTACTGC |
| | | GCCAAAGTGGAAGGTTCAGGATCGCTGGACTACTGGGGACAGGGTACT |
| | | CTCGTGACCGTGTCATCGGGCGGAGGAGGTTCCGGCGGTGGCGGCTCC |
| | | GGCGGCGGAGGGTCGGAGATCGTGATGACCCAGAGCCCTGGTACTCTG |
| | | AGCCTTTCGCCGGGAGAAAGGGCCACCCTGTCCTGCCGCGCTTCCCAA |
| | | TCCGTGTCCTCCGCGTACTTGGCGTGGTACCAGCAGAAGCCGGGACAG |
| | | CCCCCTCGGCTGCTGATCAGCGGGGCCAGCACCCGGGCAACCGGAATC |
| | | CCAGACAGATTCGGGGGTTCCGGCAGCGGCACAGATTTCACCCTGACT |
| | | ATTTCGAGGTTGGAGCCCGAGGACTTTGCGGTGTATTACTGTCAGCAC |
| | | TACGGGTCGTCCTTTAATGGCTCCAGCCTGTTCACGTTCGGACAGGGG |
| | | ACCCGCCTGGAAATCAAG |
| BCMA_EBB- | 1107 | EVQLVESGGGLVQPGGSLRLSCAASGFTFSSYAMSWVRQAPGKGLEWV |
| C1978-A4- | | SAISGSGGSTYYADSVKGRFTISRDNSKNTLYLQMNSLRAEDTAVYYC |
| aa | | AKVEGSGSLDYWGQGTLVTVSS |
| VH | | |
| BCMA_EBB- | 1108 | EIVMTQSPGTLSLSPGERATLSCRASQSVSSAYLAWYQQKPGQPPRLL |
| C1978-A4- | | ISGASTRATGIPDRFGGSGSGTDFTLTISRLEPEDFAVYYCQHYGSSF |
| aa | | NGSSLFTFGQGTRLEIK |
| VL | | |
| BCMA_EBB- | 1109 | MALPVTALLLPLALLLHAARPEVQLVESGGGLVQPGGSLRLSCAASGF |
| C1978-A4- | | TFSSYAMSWVRQAPGKGLEWVSAISGSGGSTYYADSVKGRFTISRDNS |
| aa | | KNTLYLQMNSLRAEDTAVYYCAKVEGSGSLDYWGQGTLVTVSSGGGGS |
| Full CART | | GGGGSGGGGSEIVMTQSPGTLSLSPGERATLSCRASQSVSSAYLAWYQ |
| | | QKPGQPPRLLISGASTRATGIPDRFGGSGSGTDFTLTISRLEPEDFAV |
| | | YYCQHYGSSFNGSSLFTFGQGTRLEIKTTTPAPRPPTPAPTIASQPLS |
| | | LRPEACRPAAGGAVHTRGLDFACDIYIWAPLAGTCGVLLLSLVITLYC |
| | | KRGRKKLLYIFKQPFMRPVQTTQEEDGCSCRFPEEEEGGCELRVKFSR |
| | | SADAPAYKQGQNQLYNELNLGRREEYDVLDKRRGRDPEMGGKPRRKNP |
| | | QEGLYNELQKDKMAEAYSEIGMKGERRRGKGHDGLYQGLSTATKDTYD |
| | | ALHMQALPPR |
| BCMA_EBB- | 1110 | ATGGCCCTCCCTGTCACCGCCCTGCTGCTTCCGCTGGCTCTTCTGCTC |
| C1978-A4- | | CACGCCGCTCGGCCCGAAGTGCAGCTCGTGGAGTCAGGAGGCGGCCTG |
| nt | | GTCCAGCCGGGAGGGTCCCTTAGACTGTCATGCGCCGCAAGCGGATTC |
| Full CART | | ACTTTCTCCTCCTATGCCATGAGCTGGGTCCGCCAAGCCCCCGGAAAG |
| | | GGACTGGAATGGGTGTCCGCCATCTCGGGGTCTGGAGGCTCAACTTAC |
| | | TACGCTGACTCCGTGAAGGGACGGTTCACCATTAGCCGCGACAACTCC |
| | | AAGAACACCCTCTACCTCCAAATGAACTCCCTGCGGGCCGAGGATACC |
| | | GCCGTCTACTACTGCGCCAAAGTGGAAGGTTCAGGATCGCTGGACTAC |
| | | TGGGGACAGGGTACTCTCGTGACCGTGTCATCGGGCGGAGGAGGTTCC |
| | | GGCGGTGGCGGCTCCGGCGGCGGAGGGTCGGAGATCGTGATGACCCAG |
| | | AGCCCTGGTACTCTGAGCCTTTCGCCGGGAGAAAGGGCCACCCTGTCC |
| | | TGCCGCGCTTCCCAATCCGTGTCCTCCGCGTACTTGGCGTGGTACCAG |
| | | CAGAAGCCGGGACAGCCCCCTCGGCTGCTGATCAGCGGGGCCAGCACC |
| | | CGGGCAACCGGAATCCCAGACAGATTCGGGGGTTCCGGCAGCGGCACA |
| | | GATTTCACCCTGACTATTTCGAGGTTGGAGCCCGAGGACTTTGCGGTG |
| | | TATTACTGTCAGCACTACGGGTCGTCCTTTAATGGCTCCAGCCTGTTC |
| | | ACGTTCGGACAGGGGACCCGCCTGGAAATCAAGACCACTACCCCAGCA |
| | | CCGAGGCCACCCACCCCGGCTCCTACCATCGCCTCCCAGCCTCTGTCC |
| | | CTGCGTCCGGAGGCATGTAGACCCGCAGCTGGTGGGGCCGTGCATACC |
| | | CGGGGTCTTGACTTCGCCTGCGATATCTACATTTGGGCCCCTCTGGCT |
| | | GGTACTTGCGGGGTCCTGCTGCTTTCACTCGTGATCACTCTTTACTGT |
| | | AAGCGCGGTCGGAAGAAGCTGCTGTACATCTTTAAGCAACCCTTCATG |
| | | AGGCCTGTGCAGACTACTCAAGAGGAGGACGGCTGTTCATGCCGGTTC |
| | | CCAGAGGAGGAGGAAGGCGGCTGCGAACTGCGCGTGAAATTCAGCCGC |
| | | AGCGCAGATGCTCCAGCCTACAAGCAGGGGCAGAACCAGCTCTACAAC |
| | | GAACTCAATCTTGGTCGGAGAGAGGAGTACGACGTGCTGGACAAGCGG |
| | | AGAGGACGGGACCCAGAAATGGGCGGGAAGCCGCGCAGAAAGAATCCC |
| | | CAAGAGGGCCTGTACAACGAGCTCCAAAAGGATAAGATGGCAGAAGCC |
| | | TATAGCGAGATTGGTATGAAAGGGGAACGCAGAAGAGGCAAAGGCCAC |
| | | GACGGACTGTACCAGGGACTCAGCACCGCCACCAAGGACACCTATGAC |
| | | GCTCTTCACATGCAGGCCCTGCCGCCTCGG |

BCMA_EBB-C1978-G1

| | | |
|---|---|---|
| BCMA_EBB- | 1111 | EVQLVETGGGLVQPGGSLRLSCAASGITFSRYPMSWVRQAPGKGLEWVSGISD |
| C1978-G1- | | SGVSTYYADSAKGRFTISRDNSKNTLFLQMSSLRDEDTAVYYCVTRAGSEASDI |
| aa | | WGQGTMVTVSSGGGGSGGGGSGGGGSEIVLTQSPATLSLSPGERATLSCRAS |
| ScFv domain | | QSVSNSLAWYQQKPGQAPRLLIYDASSRATGIPDRFSGSGSGTDFTLTISRLEPE |
| | | DFAIYYCQQFGTSSGLTFGGGTKLEIK |
| BCMA_EBB- | 1112 | GAAGTGCAACTGGTGGAAACCGGTGGCGGCCTGGTGCAGCCTGGAGGA |
| C1978-G1- | | TCATTGAGGCTGTCATGCGCGGCCAGCGGTATTACCTTCTCCCGGTAC |
| nt | | CCCATGTCCTGGGTCAGACAGGCCCCGGGGAAAGGGCTTGAATGGGTG |
| ScFv domain | | TCCGGGATCTCGGACTCCGGTGTCAGCACTTACTACGCCGACTCCGCC |
| | | AAGGGACGCTTCACCATTTCCCGGGACAACTCGAAGAACACCCTGTTC |
| | | CTCCAAATGAGCTCCCTCCGGGACGAGGATACTGCAGTGTACTACTGC |
| | | GTGACCCGCGCCGGGTCCGAGGCGTCTGACATTTGGGGACAGGGCACT |
| | | ATGGTCACCGTGTCGTCCGGCGGAGGGGGCTCGGGAGGCGGTGGCAGC |
| | | GGAGGAGGAGGGTCCGAGATCGTGCTGACCCAATCCCCGGCCACCCTC |
| | | TCGCTGAGCCCTGGAGAAAGGGCAACCTTGTCCTGTCGCGCGAGCCAG |
| | | TCCGTGAGCAACTCCCTGGCCTGGTACCAGCAGAAGCCCGGACAGGCT |
| | | CCGAGACTTCTGATCTACGACGCTTCGAGCCGGGCCACTGGAATCCCC |
| | | GACCGCTTTTCGGGGTCCGGCTCAGGAACCGATTTCACCCTGACAATC |
| | | TCACGGCTGGAGCCAGAGGATTTCGCCATCTATTACTGCCAGCAGTTC |
| | | GGTACTTCCTCCGGCCTGACTTTCGGAGGCGGCACGAAGCTCGAAATC |
| | | AAG |
| BCMA_EBB- | 1113 | EVQLVETGGGLVQPGGSLRLSCAASGITFSRYPMSWVRQAPGKGLEWV |
| C1978-G1- | | SGISDSGVSTYYADSAKGRFTISRDNSKNTLFLQMSSLRDEDTAVYYC |
| aa | | VTRAGSEASDIWGQGTMVTVSS |
| VH | | |
| BCMA_EBB- | 1114 | EIVLTQSPATLSLSPGERATLSCRASQSVSNSLAWYQQKPGQAPRLLI |
| C1978-G1- | | YDASSRATGIPDRFSGSGSGTDFTLTISRLEPEDFAIYYCQQFGTSSG |
| aa | | LTFGGGTKLEIK |
| VL | | |
| BCMA_EBB- | 1115 | MALPVTALLLPLALLLHAARPEVQLVETGGGLVQPGGSLRLSCAASGITFSRYPM |
| C1978-G1- | | SWVRQAPGKGLEWVSGISDSGVSTYYADSAKGRFTISRDNSKNTLFLQMSSLR |
| aa | | DEDTAVYYCVTRAGSEASDIWGQGTMVTVSSGGGGSGGGGSGGGGSEIVLTQ |
| Full CART | | SPATLSLSPGERATLSCRASQSVSNSLAWYQQKPGQAPRLLIYDASSRATGIPDR |
| | | FSGSGSGTDFTLTISRLEPEDFAIYYCQQFGTSSGLTFGGGTKLEIKTTTPAPRPPT |
| | | PAPTIASQPLSLRPEACRPAAGGAVHTRGLDFACDIYIWAPLAGTCGVLLLSLVIT |
| | | LYCKRGRKKLLYIFKQPFMRPVQTTQEEDGCSCRFPEEEEGGCELRVKFSRSADA |
| | | PAYKQGQNQLYNELNLGRREEYDVLDKRRGRDPEMGGKPRRKNPQEGLYNEL |
| | | QKDKMAEAYSEIGMKGERRRGKGHDGLYQGLSTATKDTYDALHMQALPPR |
| BCMA_EBB- | 1116 | ATGGCCCTCCCTGTCACCGCCCTGCTGCTTCCGCTGGCTCTTCTGCTC |
| C1978-G1- | | CACGCCGCTCGGCCCGAAGTGCAACTGGTGGAAACCGGTGGCGGCCTG |
| nt | | GTGCAGCCTGGAGGATCATTGAGGCTGTCATGCGCGGCCAGCGGTATT |
| Full CART | | ACCTTCTCCCGGTACCCCATGTCCTGGGTCAGACAGGCCCCGGGGAAA |
| | | GGGCTTGAATGGGTGTCCGGGATCTCGGACTCCGGTGTCAGCACTTAC |
| | | TACGCCGACTCCGCCAAGGGACGCTTCACCATTTCCCGGGACAACTCG |
| | | AAGAACACCCTGTTCCTCCAAATGAGCTCCCTCCGGGACGAGGATACT |
| | | GCAGTGTACTACTGCGTGACCCGCGCCGGGTCCGAGGCGTCTGACATT |
| | | TGGGGACAGGGCACTATGGTCACCGTGTCGTCCGGCGGAGGGGGCTCG |
| | | GGAGGCGGTGGCAGCGGAGGAGGAGGGTCCGAGATCGTGCTGACCCAA |
| | | TCCCCGGCCACCCTCTCGCTGAGCCCTGGAGAAAGGGCAACCTTGTCC |
| | | TGTCGCGCGAGCCAGTCCGTGAGCAACTCCCTGGCCTGGTACCAGCAG |
| | | AAGCCCGGACAGGCTCCGAGACTTCTGATCTACGACGCTTCGAGCCGG |
| | | GCCACTGGAATCCCCGACCGCTTTTCGGGGTCCGGCTCAGGAACCGAT |
| | | TTCACCCTGACAATCTCACGGCTGGAGCCAGAGGATTTCGCCATCTAT |
| | | TACTGCCAGCAGTTCGGTACTTCCTCCGGCCTGACTTTCGGAGGCGGC |
| | | ACGAAGCTCGAAATCAAGACCACTACCCCAGCACCGAGGCCACCCACC |
| | | CCGGCTCCTACCATCGCCTCCCAGCCTCTGTCCCTGCGTCCGGAGGCA |
| | | TGTAGACCCGCAGCTGGTGGGGCCGTGCATACCCGGGGTCTTGACTTC |
| | | GCCTGCGATATCTACATTTGGGCCCCTCTGGCTGGTACTTGCGGGGTC |
| | | CTGCTGCTTTCACTCGTGATCACTCTTTACTGTAAGCGCGGTCGGAAG |
| | | AAGCTGCTGTACATCTTTAAGCAACCCTTCATGAGGCCTGTGCAGACT |
| | | ACTCAAGAGGAGGACGGCTGTTCATGCCGGTTCCCAGAGGAGGAGGAA |
| | | GGCGGCTGCGAACTGCGCGTGAAATTCAGCCGCAGCGCAGATGCTCCA |
| | | GCCTACAAGCAGGGGCAGAACCAGCTCTACAACGAACTCAATCTTGGT |
| | | CGGAGAGAGGAGTACGACGTGCTGGACAAGCGGAGAGGACGGGACCCA |
| | | GAAATGGGCGGGAAGCCGCGCAGAAAGAATCCCCAAGAGGGCCTGTAC |
| | | AACGAGCTCCAAAAGGATAAGATGGCAGAAGCCTATAGCGAGATTGGT |
| | | ATGAAAGGGGAACGCAGAAGAGGCAAAGGCCACGACGGACTGTACCAG |
| | | GGACTCAGCACCGCCACCAAGGACACCTATGACGCTCTTCACATGCAG |
| | | GCCCTGCCGCCTCGG |

BCMA_EBB-C1979-C1

| | | |
|---|---|---|
| BCMA_EBB- | 1117 | QVQLVESGGGLVQPGGSLRLSCAASGFTFSSYAMSWVRQAPGKGLEWV |
| C1979-C1- | | SAISGSGGSTYYADSVKGRFTISRDNAKNSLYLQMNSLRAEDTAIYYC |
| aa | | ARATYKRELRYYYGMDVWGQGTMVTVSSGGGGSGGGGSGGGGSEIVMT |
| ScFv domain | | QSPGTVSLSPGERATLSCRASQSVSSSFLAWYQQKPGQAPRLLIYGAS |
| | | SRATGIPDRFSGSGSGTDFTLTISRLEPEDSAVYYCQQYHSSPSWTFG |
| | | QGTRLEIK |
| BCMA_EBB- | 1118 | CAAGTGCAGCTCGTGGAATCGGGTGGCGGACTGGTGCAGCCGGGGGGC |
| C1979-C1-nt | | TCACTTAGACTGTCCTGCGCGGCCAGCGGATTCACTTTCTCCTCCTAC |
| ScFv domain | | GCCATGTCCTGGGTCAGACAGGCCCCTGGAAAGGGCCTGGAATGGGTG |
| | | TCCGCAATCAGCGGCAGCGGCGGCTCGACCTATTACGCGGATTCAGTG |
| | | AAGGGCAGATTCACCATTTCCCGGGACAACGCCAAGAACTCCTTGTAC |
| | | CTTCAAATGAACTCCCTCCGCGCGGAAGATACCGCAATCTACTACTGC |
| | | GCTCGGGCCACTTACAAGAGGGAACTGCGCTACTACTACGGGATGGAC |
| | | GTCTGGGGCCAGGGAACCATGGTCACCGTGTCCAGCGGAGGAGGAGGA |
| | | TCGGGAGGAGGCGGTAGCGGGGGTGGAGGGTCGGAGATCGTGATGACC |
| | | CAGTCCCCCGGCACTGTGTCGCTGTCCCCCGGCGAACGGGCCACCCTG |
| | | TCATGTCGGGCCAGCCAGTCAGTGTCGTCAAGCTTCCTCGCCTGGTAC |
| | | CAGCAGAAACCGGGACAAGCTCCCCGCCTGCTGATCTACGGAGCCAGC |
| | | AGCCGGGCCACCGGTATTCCTGACCGGTTCTCCGGTTCGGGGTCCGGG |
| | | ACCGACTTTACTCTGACTATCTCTCGCCTCGAGCCAGAGGACTCCGCC |
| | | GTGTATTACTGCCAGCAGTACCACTCCTCCCCGTCCTGGACGTTCGGA |
| | | CAGGGCACAAGGCTGGAGATTAAG |
| BCMA_EBB- | 1119 | QVQLVESGGGLVQPGGSLRLSCAASGFTFSSYAMSWVRQAPGKGLEWV |
| C1979-C1- | | SAISGSGGSTYYADSVKGRFTISRDNAKNSLYLQMNSLRAEDTAIYYC |
| aa | | ARATYKRELRYYYGMDVWGQGTMVTVSS |
| VH | | |
| BCMA_EBB- | 1120 | EIVMTQSPGTVSLSPGERATLSCRASQSVSSSFLAWYQQKPGQAPRLL |
| C1979-C1- | | IYGASSRATGIPDRFSGSGSGTDFTLTISRLEPEDSAVYYCQQYHSSP |
| aa | | SWTFGQGTRLEIK |
| VL | | |
| BCMA_EBB- | 1121 | MALPVTALLLPLALLLHAARPQVQLVESGGGLVQPGGSLRLSCAASGF |
| C1979-C1- | | TFSSYAMSWVRQAPGKGLEWVSAISGSGGSTYYADSVKGRFTISRDNA |
| aa | | KNSLYLQMNSLRAEDTAIYYCARATYKRELRYYYGMDVWGQGTMVTVS |
| Full CART | | SGGGGSGGGGSGGGGSEIVMTQSPGTVSLSPGERATLSCRASQSVSSS |
| | | FLAWYQQKPGQAPRLLIYGASSRATGIPDRFSGSGSGTDFTLTISRLE |
| | | PEDSAVYYCQQYHSSPSWTFGQGTRLEIKTTTPAPRPPTPAPTIASQP |
| | | LSLRPEACRPAAGGAVHTRGLDFACDIYIWAPLAGTCGVLLLSLVITL |
| | | YCKRGRKKLLYIFKQPFMRPVQTTQEEDGCSCRFPEEEEGGCELRVKF |
| | | SRSADAPAYKQGQNQLYNELNLGRREEYDVLDKRRGRDPEMGGKPRRK |
| | | NPQEGLYNELQKDKMAEAYSEIGMKGERRRGKGHDGLYQGLSTATKDT |
| | | YDALHMQALPPR |
| BCMA_EBB- | 1122 | ATGGCCCTCCCTGTCACCGCCCTGCTGCTTCCGCTGGCTCTTCTGCTC |
| C1979-C1-nt | | CACGCCGCTCGGCCCCAAGTGCAGCTCGTGGAATCGGGTGGCGGACTG |
| Full CART | | GTGCAGCCGGGGGGCTCACTTAGACTGTCCTGCGCGGCCAGCGGATTC |
| | | ACTTTCTCCTCCTACGCCATGTCCTGGGTCAGACAGGCCCCTGGAAAG |
| | | GGCCTGGAATGGGTGTCCGCAATCAGCGGCAGCGGCGGCTCGACCTAT |
| | | TACGCGGATTCAGTGAAGGGCAGATTCACCATTTCCCGGGACAACGCC |
| | | AAGAACTCCTTGTACCTTCAAATGAACTCCCTCCGCGCGGAAGATACC |
| | | GCAATCTACTACTGCGCTCGGGCCACTTACAAGAGGGAACTGCGCTAC |
| | | TACTACGGGATGGACGTCTGGGGCCAGGGAACCATGGTCACCGTGTCC |
| | | AGCGGAGGAGGAGGATCGGGAGGAGGCGGTAGCGGGGGTGGAGGGTCG |
| | | GAGATCGTGATGACCCAGTCCCCCGGCACTGTGTCGCTGTCCCCCGGC |
| | | GAACGGGCCACCCTGTCATGTCGGGCCAGCCAGTCAGTGTCGTCAAGC |
| | | TTCCTCGCCTGGTACCAGCAGAAACCGGGACAAGCTCCCCGCCTGCTG |
| | | ATCTACGGAGCCAGCAGCCGGGCCACCGGTATTCCTGACCGGTTCTCC |
| | | GGTTCGGGGTCCGGGACCGACTTTACTCTGACTATCTCTCGCCTCGAG |
| | | CCAGAGGACTCCGCCGTGTATTACTGCCAGCAGTACCACTCCTCCCCG |
| | | TCCTGGACGTTCGGACAGGGCACAAGGCTGGAGATTAAGACCACTACC |
| | | CCAGCACCGAGGCCACCCACCCCGGCTCCTACCATCGCCTCCCAGCCT |
| | | CTGTCCCTGCGTCCGGAGGCATGTAGACCCGCAGCTGGTGGGGCCGTG |
| | | CATACCCGGGGTCTTGACTTCGCCTGCGATATCTACATTTGGGCCCCT |
| | | CTGGCTGGTACTTGCGGGGTCCTGCTGCTTTCACTCGTGATCACTCTT |
| | | TACTGTAAGCGCGGTCGGAAGAAGCTGCTGTACATCTTTAAGCAACCC |
| | | TTCATGAGGCCTGTGCAGACTACTCAAGAGGAGGACGGCTGTTCATGC |
| | | CGGTTCCCAGAGGAGGAGGAAGGCGGCTGCGAACTGCGCGTGAAATTC |
| | | AGCCGCAGCGCAGATGCTCCAGCCTACAAGCAGGGGCAGAACCAGCTC |
| | | TACAACGAACTCAATCTTGGTCGGAGAGAGGAGTACGACGTGCTGGAC |
| | | AAGCGGAGAGGACGGGACCCAGAAATGGGCGGGAAGCCGCGCAGAAAG |
| | | AATCCCCAAGAGGGCCTGTACAACGAGCTCCAAAAGGATAAGATGGCA |
| | | GAAGCCTATAGCGAGATTGGTATGAAAGGGGAACGCAGAAGAGGCAAA |
| | | GGCCACGACGGACTGTACCAGGGACTCAGCACCGCCACCAAGGACACC |
| | | TATGACGCTCTTCACATGCAGGCCCTGCCGCCTCGG |

BCMA_EBB-C1978-C7

| | | |
|---|---|---|
| BCMA_EBB- | 1123 | EVQLVETGGGLVQPGGSLRLSCAASGFTFSSYAMSWVRQAPGKGLEWV |
| C1978-C7- | | SAISGSGGSTYYADSVKGRFTISRDNSKNTLYLQMNTLKAEDTAVYYC |
| aa | | ARATYKRELRYYYGMDVWGQGTTVTVSSGGGGSGGGGSGGGGSEIVLT |
| ScFv domain | | QSPSTLSLSPGESATLSCRASQSVSTTFLAWYQQKPGQAPRLLIYGSS |
| | | NRATGIPDRFSGSGSGTDFTLTIRRLEPEDFAVYYCQQYHSSPSWTFG |
| | | QGTKVEIK |
| BCMA_EBB- | 1124 | GAGGTGCAGCTTGTGGAAACCGGTGGCGGACTGGTGCAGCCCGGAGGA |
| C1978-C7-nt | | AGCCTCAGGCTGTCCTGCGCCGCGTCCGGCTTCACCTTCTCCTCGTAC |
| ScFv domain | | GCCATGTCCTGGGTCCGCCAGGCCCCCGGAAAGGGCCTGGAATGGGTG |
| | | TCCGCCATCTCTGGAAGCGGAGGTTCCACGTACTACGCGGACAGCGTC |
| | | AAGGGAAGGTTCACAATCTCCCGCGATAATTCGAAGAACACTCTGTAC |
| | | CTTCAAATGAACACCCTGAAGGCCGAGGACACTGCTGTGTACTACTGC |
| | | GCACGGGCCACCTACAAGAGAGAGCTCCGGTACTACTACGGAATGGAC |
| | | GTCTGGGGCCAGGGAACTACTGTGACCGTGTCCTCGGGAGGGGGTGGC |
| | | TCCGGGGGGGGCGGCTCCGGCGGAGGCGGTTCCGAGATTGTGCTGACC |
| | | CAGTCACCTTCAACTCTGTCGCTGTCCCCGGGAGAGAGCGCTACTCTG |
| | | AGCTGCCGGGCCAGCCAGTCCGTGTCCACCACCTTCCTCGCCTGGTAT |
| | | CAGCAGAAGCCGGGGCAGGCACCACGGCTCTTGATCTACGGGTCAAGC |
| | | AACAGAGCGACCGGAATTCCTGACCGCTTCTCGGGGAGCGGTTCAGGC |
| | | ACCGACTTCACCCTGACTATCCGGCGCCTGGAACCCGAAGATTTCGCC |
| | | GTGTATTACTGTCAACAGTACCACTCCTCGCCGTCCTGGACCTTTGGC |
| | | CAAGGAACCAAAGTGGAAATCAAG |
| BCMA_EBB- | 1125 | EVQLVETGGGLVQPGGSLRLSCAASGFTFSSYAMSWVRQAPGKGLEWV |
| C1978-C7- | | SAISGSGGSTYYADSVKGRFTISRDNSKNTLYLQMNTLKAEDTAVYYC |
| aa | | ARATYKRELRYYYGMDVWGQGTTVTVSS |
| VH | | |
| BCMA_EBB- | 1126 | EIVLTQSPSTLSLSPGESATLSCRASQSVSTTFLAWYQQKPGQAPRLL |
| C1978-C7- | | IYGSSNRATGIPDRFSGSGSGTDFTLTIRRLEPEDFAVYYCQQYHSSP |
| aa | | SWTFGQGTKVEIK |
| VL | | |
| BCMA_EBB- | 1127 | MALPVTALLLPLALLLHAARPEVQLVETGGGLVQPGGSLRLSCAASGF |
| C1978-C7- | | TFSSYAMSWVRQAPGKGLEWVSAISGSGGSTYYADSVKGRFTISRDNS |
| aa | | KNTLYLQMNTLKAEDTAVYYCARATYKRELRYYYGMDVWGQGTTVTVS |
| Full CART | | SGGGGSGGGGSGGGGSEIVLTQSPSTLSLSPGESATLSCRASQSVSTT |
| | | FLAWYQQKPGQAPRLLIYGSSNRATGIPDRFSGSGSGTDFTLTIRRLE |
| | | PEDFAVYYCQQYHSSPSWTFGQGTKVEIKTTTPAPRPPTPAPTIASQP |
| | | LSLRPEACRPAAGGAVHTRGLDFACDIYIWAPLAGTCGVLLLSLVITL |
| | | YCKRGRKKLLYIFKQPFMRPVQTTQEEDGCSCRFPEEEEGGCELRVKF |
| | | SRSADAPAYKQGQNQLYNELNLGRREEYDVLDKRRGRDPEMGGKPRRK |
| | | NPQEGLYNELQKDKMAEAYSEIGMKGERRRGKGHDGLYQGLSTATKDT |
| | | YDALHMQALPPR |
| BCMA_EBB- | 1128 | ATGGCCCTCCCTGTCACCGCCCTGCTGCTTCCGCTGGCTCTTCTGCTC |
| C1978-C7-nt | | CACGCCGCTCGGCCCGAGGTGCAGCTTGTGGAAACCGGTGGCGGACTG |
| Full CAR | | GTGCAGCCCGGAGGAAGCCTCAGGCTGTCCTGCGCCGCGTCCGGCTTC |
| | | TACCTTCTCCTCGTACGCCATGTCCTGGGTCCGCCAGGCCCCCGGAAAG |
| | | GGCCTGGAATGGGTGTCCGCCATCTCTGGAAGCGGAGGTTCCACGTAC |
| | | TACGCGGACAGCGTCAAGGGAAGGTTCACAATCTCCCGCGATAATTCG |
| | | AAGAACACTCTGTACCTTCAAATGAACACCCTGAAGGCCGAGGACACT |
| | | GCTGTGTACTACTGCGCACGGGCCACCTACAAGAGAGAGCTCCGGTAC |
| | | TACTACGGAATGGACGTCTGGGGCCAGGGAACTACTGTGACCGTGTCC |
| | | TCGGGAGGGGGTGGCTCCGGGGGGGGCGGCTCCGGCGGAGGCGGTTCC |
| | | GAGATTGTGCTGACCCAGTCACCTTCAACTCTGTCGCTGTCCCCGGGA |
| | | GAGAGCGCTACTCTGAGCTGCCGGGCCAGCCAGTCCGTGTCCACCACC |
| | | TTCCTCGCCTGGTATCAGCAGAAGCCGGGGCAGGCACCACGGCTCTTG |
| | | ATCTACGGGTCAAGCAACAGAGCGACCGGAATTCCTGACCGCTTCTCG |
| | | GGGAGCGGTTCAGGCACCGACTTCACCCTGACTATCCGGCGCCTGGAA |
| | | CCCGAAGATTTCGCCGTGTATTACTGTCAACAGTACCACTCCTCGCCG |
| | | TCCTGGACCTTTGGCCAAGGAACCAAAGTGGAAATCAAGACCACTACC |
| | | CCAGCACCGAGGCCACCCACCCCGGCTCCTACCATCGCCTCCCAGCCT |
| | | CTGTCCCTGCGTCCGGAGGCATGTAGACCCGCAGCTGGTGGGGCCGTG |
| | | CATACCCGGGGTCTTGACTTCGCCTGCGATATCTACATTTGGGCCCCT |
| | | CTGGCTGGTACTTGCGGGGTCCTGCTGCTTTCACTCGTGATCACTCTT |
| | | TACTGTAAGCGCGGTCGGAAGAAGCTGCTGTACATCTTTAAGCAACCC |
| | | TTCATGAGGCCTGTGCAGACTACTCAAGAGGAGGACGGCTGTTCATGC |
| | | CGGTTCCCAGAGGAGGAGGAAGGCGGCTGCGAACTGCGCGTGAAATTC |
| | | AGCCGCAGCGCAGATGCTCCAGCCTACAAGCAGGGGCAGAACCAGCTC |
| | | TACAACGAACTCAATCTTGGTCGGAGAGAGGAGTACGACGTGCTGGAC |
| | | AAGCGGAGAGGACGGGACCCAGAAATGGGCGGGAAGCCGCGCAGAAAG |
| | | AATCCCCAAGAGGGCCTGTACAACGAGCTCCAAAAGGATAAGATGGCA |
| | | GAAGCCTATAGCGAGATTGGTATGAAAGGGGAACGCAGAAGAGGCAAA |
| | | GGCCACGACGGACTGTACCAGGGACTCAGCACCGCCACCAAGGACACC |
| | | TATGACGCTCTTCACATGCAGGCCCTGCCGCCTCGG |

BCMA_EBB-C1978-D10

| | | |
|---|---|---|
| BCMA_EBB- | 1129 | EVQLVETGGGLVQPGRSLRLSCAASGFTFDDYAMHWVRQAPGKGLEWV |
| C1978-D10- | | SGISWNSGSIGYADSVKGRFTISRDNAKNSLYLQMNSLRDEDTAVYYC |
| aa | | ARVGKAVPDVWGQGTTVTVSSGGGGSGGGGSGGGGSDIVMTQTPSSLS |
| ScFv domain | | ASVGDRVTITCRASQSISSYLNWYQQKPGKAPKLLIYAASSLQSGVPS |
| | | RFSGSGSGTDFTLTISSLQPEDFATYYCQQSYSTPYSFGQGTRLEIK |
| BCMA_EBB- | 1130 | GAAGTGCAGCTCGTGGAAACTGGAGGTGGACTCGTGCAGCCTGGACGG |
| C1978-D10- | | TCGCTGCGGCTGAGCTGCGCTGCATCCGGCTTCACCTTCGACGATTAT |
| nt | | GCCATGCACTGGGTCAGACAGGCGCCAGGGAAGGGACTTGAGTGGGTG |
| ScFv domain | | TCCGGTATCAGCTGGAATAGCGGCTCAATCGGATACGCGGACTCCGTG |
| | | AAGGGAAGGTTCACCATTTCCCGCGACAACGCCAAGAACTCCCTGTAC |
| | | TTGCAAATGAACAGCCTCCGGGATGAGGACACTGCCGTGTACTACTGC |
| | | GCCCGCGTCGGAAAAGCTGTGCCCGACGTCTGGGGCCAGGGAACCACT |
| | | GTGACCGTGTCCAGCGGCGGGGGTGGATCGGGCGGTGGAGGGTCCGGT |
| | | GGAGGGGGCTCAGATATTGTGATGACCCAGACCCCCTCGTCCCTGTCC |
| | | GCCTCGGTCGGCGACCGCGTGACTATCACATGTAGAGCCTCGCAGAGC |
| | | ATCTCCAGCTACCTGAACTGGTATCAGCAGAAGCCGGGGAAGGCCCCG |
| | | AAGCTCCTGATCTACGCGGCATCATCACTGCAATCGGGAGTGCCGAGC |
| | | CGGTTTTCCGGGTCCGGCTCCGGCACCGACTTCACGCTGACCATTTCT |
| | | TCCCTGCAACCCGAGGACTTCGCCACTTACTACTGCCAGCAGTCCTAC |
| | | TCCACCCCTTACTCCTTCGGCCAAGGAACCAGGCTGGAAATCAAG |
| BCMA_EBB- | 1131 | EVQLVETGGGLVQPGRSLRLSCAASGFTFDDYAMHWVRQAPGKGLEWV |
| C1978-D10- | | SGISWNSGSIGYADSVKGRFTISRDNAKNSLYLQMNSLRDEDTAVYYC |
| aa | | ARVGKAVPDVWGQGTTVTVSS |
| VH | | |
| BCMA_EBB- | 1132 | DIVMTQTPSSLSASVGDRVTITCRASQSISSYLNWYQQKPGKAPKLLI |
| C1978-D10- | | YAASSLQSGVPSRFSGSGSGTDFTLTISSLQPEDFATYYCQQSYSTPY |
| aa | | SFGQGTRLEIK |
| VL | | |
| BCMA_EBB- | 1133 | MALPVTALLLPLALLLHAARPEVQLVETGGGLVQPGRSLRLSCAASGF |
| C1978-D10- | | TFDDYAMHWVRQAPGKGLEWVSGISWNSGSIGYADSVKGRFTISRDNA |
| aa | | KNSLYLQMNSLRDEDTAVYYCARVGKAVPDVWGQGTTVTVSSGGGGSG |
| Full CART | | GGGSGGGGSDIVMTQTPSSLSASVGDRVTITCRASQSISSYLNWYQQK |
| | | PGKAPKLLIYAASSLQSGVPSRFSGSGSGTDFTLTISSLQPEDFATYY |
| | | CQQSYSTPYSFGQGTRLEIKTTTPAPRPPTPAPTIASQPLSLRPEACR |
| | | PAAGGAVHTRGLDFACDIYIWAPLAGTCGVLLLSLVITLYCKRGRKKL |
| | | LYIFKQPFMRPVQTTQEEDGCSCRFPEEEEGGCELRVKFSRSADAPAY |
| | | KQGQNQLYNELNLGRREEYDVLDKRRGRDPEMGGKPRRKNPQEGLYNE |
| | | LQKDKMAEAYSEIGMKGERRRGKGHDGLYQGLSTATKDTYDALHMQAL |
| | | PPR |
| BCMA_EBB- | 1134 | ATGGCCCTCCCTGTCACCGCCCTGCTGCTTCCGCTGGCTCTTCTGCTC |
| C1978-D10- | | CACGCCGCTCGGCCCGAAGTGCAGCTCGTGGAAACTGGAGGTGGACTC |
| nt | | GTGCAGCCTGGACGGTCGCTGCGGCTGAGCTGCGCTGCATCCGGCTTC |
| Full CART | | ACCTTCGACGATTATGCCATGCACTGGGTCAGACAGGCGCCAGGGAAG |
| | | GGACTTGAGTGGGTGTCCGGTATCAGCTGGAATAGCGGCTCAATCGGA |
| | | TACGCGGACTCCGTGAAGGGAAGGTTCACCATTTCCCGCGACAACGCC |
| | | AAGAACTCCCTGTACTTGCAAATGAACAGCCTCCGGGATGAGGACACT |
| | | GCCGTGTACTACTGCGCCCGCGTCGGAAAAGCTGTGCCCGACGTCTGG |
| | | GGCCAGGGAACCACTGTGACCGTGTCCAGCGGCGGGGGTGGATCGGGC |
| | | GGTGGAGGGTCCGGTGGAGGGGGCTCAGATATTGTGATGACCCAGACC |
| | | CCCTCGTCCCTGTCCGCCTCGGTCGGCGACCGCGTGACTATCACATGT |
| | | AGAGCCTCGCAGAGCATCTCCAGCTACCTGAACTGGTATCAGCAGAAG |
| | | CCGGGGAAGGCCCCGAAGCTCCTGATCTACGCGGCATCATCACTGCAA |
| | | TCGGGAGTGCCGAGCCGGTTTTCCGGGTCCGGCTCCGGCACCGACTTC |
| | | ACGCTGACCATTTCTTCCCTGCAACCCGAGGACTTCGCCACTTACTAC |
| | | TGCCAGCAGTCCTACTCCACCCCTTACTCCTTCGGCCAAGGAACCAGG |
| | | CTGGAAATCAAGACCACTACCCCAGCACCGAGGCCACCCACCCCGGCT |
| | | CCTACCATCGCCTCCCAGCCTCTGTCCCTGCGTCCGGAGGCATGTAGA |
| | | CCCGCAGCTGGTGGGGCCGTGCATACCCGGGGTCTTGACTTCGCCTGC |
| | | GATATCTACATTTGGGCCCCTCTGGCTGGTACTTGCGGGGTCCTGCTG |
| | | CTTTCACTCGTGATCACTCTTTACTGTAAGCGCGGTCGGAAGAAGCTG |
| | | CTGTACATCTTTAAGCAACCCTTCATGAGGCCTGTGCAGACTACTCAA |
| | | GAGGAGGACGGCTGTTCATGCCGGTTCCCAGAGGAGGAGGAAGGCGGC |
| | | TGCGAACTGCGCGTGAAATTCAGCCGCAGCGCAGATGCTCCAGCCTAC |
| | | AAGCAGGGGCAGAACCAGCTCTACAACGAACTCAATCTTGGTCGGAGA |
| | | GAGGAGTACGACGTGCTGGACAAGCGGAGAGGACGGGACCCAGAAATG |
| | | GGCGGGAAGCCGCGCAGAAAGAATCCCCAAGAGGGCCTGTACAACGAG |
| | | CTCCAAAAGGATAAGATGGCAGAAGCCTATAGCGAGATTGGTATGAAA |
| | | GGGGAACGCAGAAGAGGCAAAGGCCACGACGGACTGTACCAGGGACTC |
| | | AGCACCGCCACCAAGGACACCTATGACGCTCTTCACATGCAGGCCCTG |
| | | CCGCCTCGG |

BCMA_EBB-C1979-C12

| | | |
|---|---|---|
| BCMA_EBB- | 1135 | EVQLVESGGGLVQPGRSLRLSCTASGFTFDDYAMHWVRQRPGKGLEWV |
| C1979-C12- | | ASINWKGNSLAYGDSVKGRFAISRDNAKNTVFLQMNSLRTEDTAVYYC |
| aa | | ASHQGVAYYNYAMDVWGRGTLVTVSSGGGGSGGGGSGGGGSEIVLTQS |
| ScFv domain | | PGTLSLSPGERATLSCRATQSIGSSFLAWYQQRPGQAPRLLIYGASQR |
| | | ATGIPDRFSGRGSGTDFTLTISRVEPEDSAVYYCQHYESSPSWTFGQG |
| | | TKVEIK |
| BCMA_EBB- | 1136 | GAAGTGCAGCTCGTGGAGAGCGGGGGAGGATTGGTGCAGCCCGGAAGG |
| C1979-C12- | | TCCCTGCGGCTCTCCTGCACTGCGTCTGGCTTCACCTTCGACGACTAC |
| nt | | GCGATGCACTGGGTCAGACAGCGCCCGGGAAAGGGCCTGGAATGGGTC |
| ScFv domain | | GCCTCAATCAACTGGAAGGGAAACTCCCTGGCCTATGGCGACAGCGTG |
| | | AAGGGCCGCTTCGCCATTTCGCGCGACAACGCCAAGAACACCGTGTTT |
| | | CTGCAAATGAATTCCCTGCGGACCGAGGATACCGCTGTGTACTACTGC |
| | | GCCAGCCACCAGGGCGTGGCATACTATAACTACGCCATGGACGTGTGG |
| | | GGAAGAGGGACGCTCGTCACCGTGTCCTCCGGGGGCGGTGGATCGGGT |
| | | GGAGGAGGAAGCGGTGGCGGGGGCAGCGAAATCGTGCTGACTCAGAGC |
| | | CCGGGAACTCTTTCACTGTCCCCGGGAGAACGGGCCACTCTCTCGTGC |
| | | CGGGCCACCCAGTCCATCGGCTCCTCCTTCCTTGCCTGGTACCAGCAG |
| | | AGGCCAGGACAGGCGCCCCGCCTGCTGATCTACGGTGCTTCCCAACGC |
| | | GCCACTGGCATTCCTGACCGGTTCAGCGGCAGAGGGTCGGGAACCGAT |
| | | TTCACACTGACCATTTCCCGGGTGGAGCCCGAAGATTCGGCAGTCTAC |
| | | TACTGTCAGCATTACGAGTCCTCCCCTTCATGGACCTTCGGTCAAGGG |
| | | ACCAAAGTGGAGATCAAG |
| BCMA_EBB- | 1137 | EVQLVESGGGLVQPGRSLRLSCTASGFTFDDYAMHWVRQRPGKGLEWV |
| C1979-C12- | | ASINWKGNSLAYGDSVKGRFAISRDNAKNTVFLQMNSLRTEDTAVYYC |
| aa | | ASHQGVAYYNYAMDVWGRGTLVTVSS |
| VH | | |
| BCMA_EBB- | 1138 | EIVLTQSPGTLSLSPGERATLSCRATQSIGSSFLAWYQQRPGQAPRLL |
| C1979-C12- | | IYGASQRATGIPDRFSGRGSGTDFTLTISRVEPEDSAVYYCQHYESSP |
| aa | | SWTFGQGTKVEIK |
| VL | | |
| BCMA_EBB- | 1139 | MALPVTALLLPLALLLHAARPEVQLVESGGGLVQPGRSLRLSCTASGF |
| C1979-C12- | | TFDDYAMHWVRQRPGKGLEWVASINWKGNSLAYGDSVKGRFAISRDNA |
| aa | | KNTVFLQMNSLRTEDTAVYYCASHQGVAYYNYAMDVWGRGTLVTVSSG |
| Full CART | | GGGSGGGGSGGGGSEIVLTQSPGTLSLSPGERATLSCRATQSIGSSFL |
| | | AWYQQRPGQAPRLLIYGASQRATGIPDRFSGRGSGTDFTLTISRVEPE |
| | | DSAVYYCQHYESSPSWTFGQGTKVEIKTTTPAPRPPTPAPTIASQPLS |
| | | LRPEACRPAAGGAVHTRGLDFACDIYIWAPLAGTCGVLLLSLVITLYC |
| | | KRGRKKLLYIFKQPFMRPVQTTQEEDGCSCRFPEEEEGGCELRVKFSR |
| | | SADAPAYKQGQNQLYNELNLGRREEYDVLDKRRGRDPEMGGKPRRKNP |
| | | QEGLYNELQKDKMAEAYSEIGMKGERRRGKGHDGLYQGLSTATKDTYD |
| | | ALHMQALPPR |
| BCMA_EBB- | 1140 | ATGGCCCTCCCTGTCACCGCCCTGCTGCTTCCGCTGGCTCTTCTGCTC |
| C1979-C12- | | CACGCCGCTCGGCCCGAAGTGCAGCTCGTGGAGAGCGGGGGAGGATTG |
| nt | | GTGCAGCCCGGAAGGTCCCTGCGGCTCTCCTGCACTGCGTCTGGCTTC |
| Full CART | | ACCTTCGACGACTACGCGATGCACTGGGTCAGACAGCGCCCGGGAAAG |
| | | GGCCTGGAATGGGTCGCCTCAATCAACTGGAAGGGAAACTCCCTGGCC |
| | | TATGGCGACAGCGTGAAGGGCCGCTTCGCCATTTCGCGCGACAACGCC |
| | | AAGAACACCGTGTTTCTGCAAATGAATTCCCTGCGGACCGAGGATACC |
| | | GCTGTGTACTACTGCGCCAGCCACCAGGGCGTGGCATACTATAACTAC |
| | | GCCATGGACGTGTGGGGAAGAGGGACGCTCGTCACCGTGTCCTCCGGG |
| | | GGCGGTGGATCGGGTGGAGGAGGAAGCGGTGGCGGGGGCAGCGAAATC |
| | | GTGCTGACTCAGAGCCCGGGAACTCTTTCACTGTCCCCGGGAGAACGG |
| | | GCCACTCTCTCGTGCCGGGCCACCCAGTCCATCGGCTCCTCCTTCCTT |
| | | GCCTGGTACCAGCAGAGGCCAGGACAGGCGCCCCGCCTGCTGATCTAC |
| | | GGTGCTTCCCAACGCGCCACTGGCATTCCTGACCGGTTCAGCGGCAGA |
| | | GGGTCGGGAACCGATTTCACACTGACCATTTCCCGGGTGGAGCCCGAA |
| | | GATTCGGCAGTCTACTACTGTCAGCATTACGAGTCCTCCCCTTCATGG |
| | | ACCTTCGGTCAAGGGACCAAAGTGGAGATCAAGACCACTACCCCAGCA |
| | | CCGAGGCCACCCACCCCGGCTCCTACCATCGCCTCCCAGCCTCTGTCC |
| | | CTGCGTCCGGAGGCATGTAGACCCGCAGCTGGTGGGGCCGTGCATACC |
| | | CGGGGTCTTGACTTCGCCTGCGATATCTACATTTGGGCCCCTCTGGCT |
| | | GGTACTTGCGGGGTCCTGCTGCTTTCACTCGTGATCACTCTTTACTGT |
| | | AAGCGCGGTCGGAAGAAGCTGCTGTACATCTTTAAGCAACCCTTCATG |
| | | AGGCCTGTGCAGACTACTCAAGAGGAGGACGGCTGTTCATGCCGGTTC |
| | | CCAGAGGAGGAGGAAGGCGGCTGCGAACTGCGCGTGAAATTCAGCCGC |
| | | AGCGCAGATGCTCCAGCCTACAAGCAGGGGCAGAACCAGCTCTACAAC |
| | | GAACTCAATCTTGGTCGGAGAGAGGAGTACGACGTGCTGGACAAGCGG |
| | | AGAGGACGGGACCCAGAAATGGGCGGGAAGCCGCGCAGAAAGAATCCC |
| | | CAAGAGGGCCTGTACAACGAGCTCCAAAAGGATAAGATGGCAGAAGCC |
| | | TATAGCGAGATTGGTATGAAAGGGGAACGCAGAAGAGGCAAAGGCCAC |
| | | GACGGACTGTACCAGGGACTCAGCACCGCCACCAAGGACACCTATGAC |
| | | GCTCTTCACATGCAGGCCCTGCCGCCTCGG |

BCMA_EBB-C1980-G4

| | | |
|---|---|---|
| BCMA_EBB- | 1141 | EVQLVESGGGLVQPGGSLRLSCAASGFTFSSYAMSWVRQAPGKGLEWV |
| C1980-G4-aa | | SAISGSGGSTYYADSVKGRFTISRDNSKNTLYLQMNSLRAEDTAVYYC |
| ScFv domain | | AKVVRDGMDVWGQGTTVTVSSGGGGSGGGGSGGGGSEIVLTQSPATLS |
| | | LSPGERATLSCRASQSVSSSYLAWYQQKPGQAPRLLIYGASSRATGIP |
| | | DRFSGNGSGTDFTLTISRLEPEDFAVYYCQQYGSPPRFTFGPGTKVDI |
| | | K |
| BCMA_EBB- | 1142 | GAGGTGCAGTTGGTCGAAAGCGGGGGCGGGCTTGTGCAGCCTGGCGGA |
| C1980-G4-nt | | TCACTGCGGCTGTCCTGCGCGGCATCAGGCTTCACGTTTTCTTCCTAC |
| ScFv domain | | GCCATGTCCTGGGTGCGCCAGGCCCCTGGAAAGGGACTGGAATGGGTG |
| | | TCCGCGATTTCGGGGTCCGGCGGGAGCACCTACTACGCCGATTCCGTG |
| | | AAGGGCCGCTTCACTATCTCGCGGGACAACTCCAAGAACACCCTCTAC |
| | | CTCCAAATGAATAGCCTGCGGGCCGAGGATACCGCCGTCTACTATTGC |
| | | GCTAAGGTCGTGCGCGACGGAATGGACGTGTGGGGACAGGGTACCACC |
| | | GTGACAGTGTCCTCGGGGGGAGGCGGTAGCGGCGGAGGAGGAAGCGGT |
| | | GGTGGAGGTTCCGAGATTGTGCTGACTCAATCACCCGCGACCCTGAGC |
| | | CTGTCCCCCGGCGAAAGGGCCACTCTGTCCTGTCGGGCCAGCCAATCA |
| | | GTCTCCTCCTCGTACCTGGCCTGGTACCAGCAGAAGCCAGGACAGGCT |
| | | CCGAGACTCCTTATCTATGGCGCATCCTCCCGCGCCACCGGAATCCCG |
| | | GATAGGTTCTCGGGAAACGGATCGGGGACCGACTTCACTCTCACCATC |
| | | TCCCGGCTGGAACCGGAGGACTTCGCCGTGTACTACTGCCAGCAGTAC |
| | | GGCAGCCCGCCTAGATTCACTTTCGGCCCCGGCACCAAAGTGGACATC |
| | | AAG |
| BCMA_EBB- | 1143 | EVQLVESGGGLVQPGGSLRLSCAASGFTFSSYAMSWVRQAPGKGLEWV |
| C1980-G4-aa | | SAISGSGGSTYYADSVKGRFTISRDNSKNTLYLQMNSLRAEDTAVYYC |
| VH | | AKVVRDGMDVWGQGTTVTVSS |
| BCMA_EBB- | 1144 | EIVLTQSPATLSLSPGERATLSCRASQSVSSSYLAWYQQKPGQAPRLL |
| C1980-G4-aa | | IYGASSRATGIPDRFSGNGSGTDFTLTISRLEPEDFAVYYCQQYGSPP |
| VL | | RFTFGPGTKVDIK |
| BCMA_EBB- | 1145 | MALPVTALLLPLALLLHAARPEVQLVESGGGLVQPGGSLRLSCAASGF |
| C1980-G4-aa | | TFSSYAMSWVRQAPGKGLEWVSAISGSGGSTYYADSVKGRFTISRDNS |
| Full CART | | KNTLYLQMNSLRAEDTAVYYCAKVVRDGMDVWGQGTTVTVSSGGGGSG |
| | | GGGSGGGGSEIVLTQSPATLSLSPGERATLSCRASQSVSSSYLAWYQQ |
| | | KPGQAPRLLIYGASSRATGIPDRFSGNGSGTDFTLTISRLEPEDFAVY |
| | | YCQQYGSPPRFTFGPGTKVDIKTTTPAPRPPTPAPTIASQPLSLRPEA |
| | | CRPAAGGAVHTRGLDFACDIYIWAPLAGTCGVLLLSLVITLYCKRGRK |
| | | KLLYIFKQPFMRPVQTTQEEDGCSCRFPEEEEGGCELRVKFSRSADAP |
| | | AYKQGQNQLYNELNLGRREEYDVLDKRRGRDPEMGGKPRRKNPQEGLY |
| | | NELQKDKMAEAYSEIGMKGERRRGKGHDGLYQGLSTATKDTYDALHMQ |
| | | ALPPR |
| BCMA_EBB- | 1146 | ATGGCCCTCCCTGTCACCGCCCTGCTGCTTCCGCTGGCTCTTCTGCTC |
| C1980-G4-nt | | CACGCCGCTCGGCCCGAGGTGCAGTTGGTCGAAAGCGGGGGCGGGCTT |
| Full CART | | GTGCAGCCTGGCGGATCACTGCGGCTGTCCTGCGCGGCATCAGGCTTC |
| | | ACGTTTTCTTCCTACGCCATGTCCTGGGTGCGCCAGGCCCCTGGAAAG |
| | | GGACTGGAATGGGTGTCCGCGATTTCGGGGTCCGGCGGGAGCACCTAC |
| | | TACGCCGATTCCGTGAAGGGCCGCTTCACTATCTCGCGGGACAACTCC |
| | | AAGAACACCCTCTACCTCCAAATGAATAGCCTGCGGGCCGAGGATACC |
| | | GCCGTCTACTATTGCGCTAAGGTCGTGCGCGACGGAATGGACGTGTGG |
| | | GGACAGGGTACCACCGTGACAGTGTCCTCGGGGGGAGGCGGTAGCGGC |
| | | GGAGGAGGAAGCGGTGGTGGAGGTTCCGAGATTGTGCTGACTCAATCA |
| | | CCCGCGACCCTGAGCCTGTCCCCCGGCGAAAGGGCCACTCTGTCCTGT |
| | | CGGGCCAGCCAATCAGTCTCCTCCTCGTACCTGGCCTGGTACCAGCAG |
| | | AAGCCAGGACAGGCTCCGAGACTCCTTATCTATGGCGCATCCTCCCGC |
| | | GCCACCGGAATCCCGGATAGGTTCTCGGGAAACGGATCGGGGACCGAC |
| | | TTCACTCTCACCATCTCCCGGCTGGAACCGGAGGACTTCGCCGTGTAC |
| | | TACTGCCAGCAGTACGGCAGCCCGCCTAGATTCACTTTCGGCCCCGGC |
| | | ACCAAAGTGGACATCAAGACCACTACCCCAGCACCGAGGCCACCCACC |
| | | CCGGCTCCTACCATCGCCTCCCAGCCTCTGTCCCTGCGTCCGGAGGCA |
| | | TGTAGACCCGCAGCTGGTGGGGCCGTGCATACCCGGGGTCTTGACTTC |
| | | GCCTGCGATATCTACATTTGGGCCCCTCTGGCTGGTACTTGCGGGGTC |
| | | CTGCTGCTTTCACTCGTGATCACTCTTTACTGTAAGCGCGGTCGGAAG |
| | | AAGCTGCTGTACATCTTTAAGCAACCCTTCATGAGGCCTGTGCAGACT |
| | | ACTCAAGAGGAGGACGGCTGTTCATGCCGGTTCCCAGAGGAGGAGGAA |
| | | GGCGGCTGCGAACTGCGCGTGAAATTCAGCCGCAGCGCAGATGCTCCA |
| | | GCCTACAAGCAGGGGCAGAACCAGCTCTACAACGAACTCAATCTTGGT |
| | | CGGAGAGAGGAGTACGACGTGCTGGACAAGCGGAGAGGACGGGACCCA |
| | | GAAATGGGCGGGAAGCCGCGCAGAAAGAATCCCCAAGAGGGCCTGTAC |
| | | AACGAGCTCCAAAAGGATAAGATGGCAGAAGCCTATAGCGAGATTGGT |
| | | ATGAAAGGGGAACGCAGAAGAGGCAAAGGCCACGACGGACTGTACCAG |
| | | GGACTCAGCACCGCCACCAAGGACACCTATGACGCTCTTCACATGCAG |
| | | GCCCTGCCGCCTCGG |

BCMA_EBB-C1980-D2

| | | |
|---|---|---|
| BCMA_EBB- | 1147 | EVQLLESGGGLVQPGGSLRLSCAASGFTFSSYAMSWVRQAPGKGLEWV |
| C1980-D2-aa | | SAISGSGGSTYYADSVKGRFTISRDNSKNTLYLQMNSLRAEDTAVYYC |
| ScFv domain | | AKIPQTGTFDYWGQGTLVTVSSGGGGSGGGGSGGGGSEIVLTQSPGTL |
| | | SLSPGERATLSCRASQSVSSSYLAWYQQRPGQAPRLLIYGASSRATGI |
| | | PDRFSGSGSGTDFTLTISRLEPEDFAVYYCQHYGSSPSWTFGQGTRLE |
| | | IK |
| BCMA_EBB- | 1148 | GAAGTGCAGCTGCTGGAGTCCGGCGGTGGATTGGTGCAACCGGGGGGA |
| C1980-D2-nt | | TCGCTCAGACTGTCCTGTGCGGCGTCAGGCTTCACCTTCTCGAGCTAC |
| ScFv domain | | GCCATGTCATGGGTCAGACAGGCCCCTGGAAAGGGTCTGGAATGGGTG |
| | | TCCGCCATTTCCGGGAGCGGGGGATCTACATACTACGCCGATAGCGTG |
| | | AAGGGCCGCTTCACCATTTCCCGGGACAACTCCAAGAACACTCTCTAT |
| | | CTGCAAATGAACTCCCTCCGCGCTGAGGACACTGCCGTGTACTACTGC |
| | | GCCAAAATCCCTCAGACCGGCACCTTCGACTACTGGGGACAGGGGACT |
| | | CTGGTCACCGTCAGCAGCGGTGGCGGAGGTTCGGGGGGAGGAGGAAGC |
| | | GGCGGCGGAGGGTCCGAGATTGTGCTGACCCAGTCACCCGGCACTTTG |
| | | TCCCTGTCGCCTGGAGAAAGGGCCACCCTTTCCTGCCGGGCATCCCAA |
| | | TCCGTGTCCTCCTCGTACCTGGCCTGGTACCAGCAGAGGCCCGGACAG |
| | | GCCCCACGGCTTCTGATCTACGGAGCAAGCAGCCGCGCGACCGGTATC |
| | | CCGGACCGGTTTTCGGGCTCGGGCTCAGGAACTGACTTCACCCTCACC |
| | | ATCTCCCGCCTGGAACCCGAAGATTTCGCTGTGTATTACTGCCAGCAC |
| | | TACGGCAGCTCCCCGTCCTGGACGTTCGGCCAGGGAACTCGGCTGGAG |
| | | ATCAAG |
| BCMA_EBB- | 1149 | EVQLLESGGGLVQPGGSLRLSCAASGFTFSSYAMSWVRQAPGKGLEWV |
| C1980-D2-aa | | SAISGSGGSTYYADSVKGRFTISRDNSKNTLYLQMNSLRAEDTAVYYC |
| VH | | AKIPQTGTFDYWGQGTLVTVSS |
| BCMA_EBB- | 1150 | EIVLTQSPGTLSLSPGERATLSCRASQSVSSSYLAWYQQRPGQAPRLL |
| C1980-D2-aa | | IYGASSRATGIPDRFSGSGSGTDFTLTISRLEPEDFAVYYCQHYGSSP |
| VL | | SWTFGQGTRLEIK |
| BCMA_EBB- | 1151 | MALPVTALLLPLALLLHAARPEVQLLESGGGLVQPGGSLRLSCAASGF |
| C1980-D2-aa | | TFSSYAMSWVRQAPGKGLEWVSAISGSGGSTYYADSVKGRFTISRDNS |
| Full CART | | KNTLYLQMNSLRAEDTAVYYCAKIPQTGTFDYWGQGTLVTVSSGGGGS |
| | | GGGGSGGGGSEIVLTQSPGTLSLSPGERATLSCRASQSVSSSYLAWYQ |
| | | QRPGQAPRLLIYGASSRATGIPDRFSGSGSGTDFTLTISRLEPEDFAV |
| | | YYCQHYGSSPSWTFGQGTRLEIKTTTPAPRPPTPAPTIASQPLSLRPE |
| | | ACRPAAGGAVHTRGLDFACDIYIWAPLAGTCGVLLLSLVITLYCKRGR |
| | | KKLLYIFKQPFMRPVQTTQEEDGCSCRFPEEEEGGCELRVKFSRSADA |
| | | PAYKQGQNQLYNELNLGRREEYDVLDKRRGRDPEMGGKPRRKNPQEGL |
| | | YNELQKDKMAEAYSEIGMKGERRRGKGHDGLYQGLSTATKDTYDALHM |
| | | QALPPR |
| BCMA_EBB- | 1152 | ATGGCCCTCCCTGTCACCGCCCTGCTGCTTCCGCTGGCTCTTCTGCTC |
| C1980-D2-nt | | CACGCCGCTCGGCCCGAAGTGCAGCTGCTGGAGTCCGGCGGTGGATTG |
| Full CART | | GTGCAACCGGGGGGATCGCTCAGACTGTCCTGTGCGGCGTCAGGCTTC |
| | | ACCTTCTCGAGCTACGCCATGTCATGGGTCAGACAGGCCCCTGGAAAG |
| | | GGTCTGGAATGGGTGTCCGCCATTTCCGGGAGCGGGGGATCTACATAC |
| | | TACGCCGATAGCGTGAAGGGCCGCTTCACCATTTCCCGGGACAACTCC |
| | | AAGAACACTCTCTATCTGCAAATGAACTCCCTCCGCGCTGAGGACACT |
| | | GCCGTGTACTACTGCGCCAAAATCCCTCAGACCGGCACCTTCGACTAC |
| | | TGGGGACAGGGGACTCTGGTCACCGTCAGCAGCGGTGGCGGAGGTTCG |
| | | GGGGGAGGAGGAAGCGGCGGCGGAGGGTCCGAGATTGTGCTGACCCAG |
| | | TCACCCGGCACTTTGTCCCTGTCGCCTGGAGAAAGGGCCACCCTTTCC |
| | | TGCCGGGCATCCCAATCCGTGTCCTCCTCGTACCTGGCCTGGTACCAG |
| | | CAGAGGCCCGGACAGGCCCCACGGCTTCTGATCTACGGAGCAAGCAGC |
| | | CGCGCGACCGGTATCCCGGACCGGTTTTCGGGCTCGGGCTCAGGAACT |
| | | GACTTCACCCTCACCATCTCCCGCCTGGAACCCGAAGATTTCGCTGTG |
| | | TATTACTGCCAGCACTACGGCAGCTCCCCGTCCTGGACGTTCGGCCAG |
| | | GGAACTCGGCTGGAGATCAAGACCACTACCCCAGCACCGAGGCCACCC |
| | | ACCCCGGCTCCTACCATCGCCTCCCAGCCTCTGTCCCTGCGTCCGGAG |
| | | GCATGTAGACCCGCAGCTGGTGGGGCCGTGCATACCCGGGGTCTTGAC |
| | | TTCGCCTGCGATATCTACATTTGGGCCCCTCTGGCTGGTACTTGCGGG |
| | | GTCCTGCTGCTTTCACTCGTGATCACTCTTTACTGTAAGCGCGGTCGG |
| | | AAGAAGCTGCTGTACATCTTTAAGCAACCCTTCATGAGGCCTGTGCAG |
| | | ACTACTCAAGAGGAGGACGGCTGTTCATGCCGGTTCCCAGAGGAGGAG |
| | | GAAGGCGGCTGCGAACTGCGCGTGAAATTCAGCCGCAGCGCAGATGCT |
| | | CCAGCCTACAAGCAGGGGCAGAACCAGCTCTACAACGAACTCAATCTT |
| | | GGTCGGAGAGAGGAGTACGACGTGCTGGACAAGCGGAGAGGACGGGAC |
| | | CCAGAAATGGGCGGGAAGCCGCGCAGAAAGAATCCCCAAGAGGGCCTG |
| | | TACAACGAGCTCCAAAAGGATAAGATGGCAGAAGCCTATAGCGAGATT |
| | | GGTATGAAAGGGGAACGCAGAAGAGGCAAAGGCCACGACGGACTGTAC |
| | | CAGGGACTCAGCACCGCCACCAAGGACACCTATGACGCTCTTCACATG |
| | | CAGGCCCTGCCGCCTCGG |

BCMA_EBB-C1978-A10

| | | |
|---|---|---|
| BCMA_EBB- | 1153 | EVQLVETGGGLVQPGGSLRLSCAASGFTFSSYAMSWVRQAPGKGLEWV |
| C1978-A10- | | SAISGSGGSTYYADSVKGRFTMSRENDKNSVFLQMNSLRVEDTGVYYC |
| aa | | ARANYKRELRYYYGMDVWGQGTMVTVSSGGGGSGGGGSGGGGSEIVMT |
| ScFv domain | | QSPGTLSLSPGESATLSCRASQRVASNYLAWYQHKPGQAPSLLISGAS |
| | | SRATGVPDRFSGSGSGTDFTLAISRLEPEDSAVYYCQHYDSSPSWTFG |
| | | QGTKVEIK |
| BCMA_EBB- | 1154 | GAAGTGCAACTGGTGGAAACCGGTGGAGGACTCGTGCAGCCTGGCGGC |
| C1978-A10- | | AGCCTCCGGCTGAGCTGCGCCGCTTCGGGATTCACCTTTTCCTCCTAC |
| nt | | GCGATGTCTTGGGTCAGACAGGCCCCCGGAAAGGGGCTGGAATGGGTG |
| ScFv domain | | TCAGCCATCTCCGGCTCCGGCGGATCAACGTACTACGCCGACTCCGTG |
| | | AAAGGCCGGTTCACCATGTCGCGCGAGAATGACAAGAACTCCGTGTTC |
| | | CTGCAAATGAACTCCCTGAGGGTGGAGGACACCGGAGTGTACTATTGT |
| | | GCGCGCGCCAACTACAAGAGAGAGCTGCGGTACTACTACGGAATGGAC |
| | | GTCTGGGGACAGGGAACTATGGTGACCGTGTCATCCGGTGGAGGGGGA |
| | | AGCGGCGGTGGAGGCAGCGGGGGCGGGGGTTCAGAAATTGTCATGACC |
| | | CAGTCCCCGGGAACTCTTTCCCTCTCCCCCGGGGAATCCGCGACTTTG |
| | | TCCTGCCGGGCCAGCCAGCGCGTGGCCTCGAACTACCTCGCATGGTAC |
| | | CAGCATAAGCCAGGCCAAGCCCCTTCCCTGCTGATTTCCGGGGCTAGC |
| | | AGCCGCGCCACTGGCGTGCCGGATAGGTTCTCGGGAAGCGGCTCGGGT |
| | | ACCGATTTCACCCTGGCAATCTCGCGGCTGGAACCGGAGGATTCGGCC |
| | | GTGTACTACTGCCAGCACTATGACTCATCCCCCTCCTGGACATTCGGA |
| | | CAGGGCACCAAGGTCGAGATCAAG |
| BCMA_EBB- | 1155 | EVQLVETGGGLVQPGGSLRLSCAASGFTFSSYAMSWVRQAPGKGLEWV |
| C1978-A10- | | SAISGSGGSTYYADSVKGRFTMSRENDKNSVFLQMNSLRVEDTGVYYC |
| aa | | ARANYKRELRYYYGMDVWGQGTMVTVSS |
| VH | | |
| BCMA_EBB- | 1156 | EIVMTQSPGTLSLSPGESATLSCRASQRVASNYLAWYQHKPGQAPSLL |
| C1978-A10- | | ISGASSRATGVPDRFSGSGSGTDFTLAISRLEPEDSAVYYCQHYDSSP |
| aa | | SWTFGQGTKVEIK |
| VL | | |
| BCMA_EBB- | 1157 | MALPVTALLLPLALLLHAARPEVQLVETGGGLVQPGGSLRLSCAASGF |
| C1978-A10- | | TFSSYAMSWVRQAPGKGLEWVSAISGSGGSTYYADSVKGRFTMSREND |
| aa | | KNSVFLQMNSLRVEDTGVYYCARANYKRELRYYYGMDVWGQGTMVTVS |
| Full CART | | SGGGGSGGGGSGGGGSEIVMTQSPGTLSLSPGESATLSCRASQRVASN |
| | | YLAWYQHKPGQAPSLLISGASSRATGVPDRFSGSGSGTDFTLAISRLE |
| | | PEDSAVYYCQHYDSSPSWTFGQGTKVEIKTTTPAPRPPTPAPTIASQP |
| | | LSLRPEACRPAAGGAVHTRGLDFACDIYIWAPLAGTCGVLLLSLVITL |
| | | YCKRGRKKLLYIFKQPFMRPVQTTQEEDGCSCRFPEEEEGGCELRVKF |
| | | SRSADAPAYKQGQNQLYNELNLGRREEYDVLDKRRGRDPEMGGKPRRK |
| | | NPQEGLYNELQKDKMAEAYSEIGMKGERRRGKGHDGLYQGLSTATKDT |
| | | YDALHMQALPPR |
| BCMA_EBB- | 1158 | ATGGCCCTCCCTGTCACCGCCCTGCTGCTTCCGCTGGCTCTTCTGCTC |
| C1978-A10- | | CACGCCGCTCGGCCCGAAGTGCAACTGGTGGAAACCGGTGGAGGACTC |
| nt | | GTGCAGCCTGGCGGCAGCCTCCGGCTGAGCTGCGCCGCTTCGGGATTC |
| Full CART | | ACCTTTTCCTCCTACGCGATGTCTTGGGTCAGACAGGCCCCCGGAAAG |
| | | GGGCTGGAATGGGTGTCAGCCATCTCCGGCTCCGGCGGATCAACGTAC |
| | | TACGCCGACTCCGTGAAAGGCCGGTTCACCATGTCGCGCGAGAATGAC |
| | | AAGAACTCCGTGTTCCTGCAAATGAACTCCCTGAGGGTGGAGGACACC |
| | | GGAGTGTACTATTGTGCGCGCGCCAACTACAAGAGAGAGCTGCGGTAC |
| | | TACTACGGAATGGACGTCTGGGGACAGGGAACTATGGTGACCGTGTCA |
| | | TCCGGTGGAGGGGGAAGCGGCGGTGGAGGCAGCGGGGGCGGGGGTTCA |
| | | GAAATTGTCATGACCCAGTCCCCGGGAACTCTTTCCCTCTCCCCCGGG |
| | | GAATCCGCGACTTTGTCCTGCCGGGCCAGCCAGCGCGTGGCCTCGAAC |
| | | TACCTCGCATGGTACCAGCATAAGCCAGGCCAAGCCCCTTCCCTGCTG |
| | | ATTTCCGGGGCTAGCAGCCGCGCCACTGGCGTGCCGGATAGGTTCTCG |
| | | GGAAGCGGCTCGGGTACCGATTTCACCCTGGCAATCTCGCGGCTGGAA |
| | | CCGGAGGATTCGGCCGTGTACTACTGCCAGCACTATGACTCATCCCCC |
| | | TCCTGGACATTCGGACAGGGCACCAAGGTCGAGATCAAGACCACTACC |
| | | CCAGCACCGAGGCCACCCACCCCGGCTCCTACCATCGCCTCCCAGCCT |
| | | CTGTCCCTGCGTCCGGAGGCATGTAGACCCGCAGCTGGTGGGGCCGTG |
| | | CATACCCGGGGTCTTGACTTCGCCTGCGATATCTACATTTGGGCCCCT |
| | | CTGGCTGGTACTTGCGGGGTCCTGCTGCTTTCACTCGTGATCACTCTT |
| | | TACTGTAAGCGCGGTCGGAAGAAGCTGCTGTACATCTTTAAGCAACCC |
| | | TTCATGAGGCCTGTGCAGACTACTCAAGAGGAGGACGGCTGTTCATGC |
| | | CGGTTCCCAGAGGAGGAGGAAGGCGGCTGCGAACTGCGCGTGAAATTC |
| | | AGCCGCAGCGCAGATGCTCCAGCCTACAAGCAGGGGCAGAACCAGCTC |
| | | TACAACGAACTCAATCTTGGTCGGAGAGAGGAGTACGACGTGCTGGAC |
| | | AAGCGGAGAGGACGGGACCCAGAAATGGGCGGGAAGCCGCGCAGAAAG |
| | | AATCCCCAAGAGGGCCTGTACAACGAGCTCCAAAAGGATAAGATGGCA |
| | | GAAGCCTATAGCGAGATTGGTATGAAAGGGGAACGCAGAAGAGGCAAA |
| | | GGCCACGACGGACTGTACCAGGGACTCAGCACCGCCACCAAGGACACC |
| | | TATGACGCTCTTCACATGCAGGCCCTGCCGCCTCGG |

BCMA_EBB-C1978-D4

| | | |
|---|---|---|
| BCMA_EBB- | 1159 | EVQLLETGGGLVQPGGSLRLSCAASGFSFSSYAMSWVRQAPGKGLEWV |
| C1978-D4-aa | | SAISGSGGSTYYADSVKGRFTISRDNSKNTLYLQMNSLRAEDTAVYYC |
| ScFv domain | | AKALVGATGAFDIWGQGTLVTVSSGGGGSGGGGSGGGGSEIVLTQSPG |
| | | TLSLSPGERATLSCRASQSLSSNFLAWYQQKPGQAPGLLIYGASNWAT |
| | | GTPDRFSGSGSGTDFTLTITRLEPEDFAVYYCQYYGTSPMYTFGQGTK |
| | | VEIK |
| BCMA_EBB- | 1160 | GAAGTGCAGCTGCTCGAAACCGGTGGAGGGCTGGTGCAGCCAGGGGGC |
| C1978-D4-nt | | TCCCTGAGGCTTTCATGCGCCGCTAGCGGATTCTCCTTCTCCTCTTAC |
| ScFv domain | | GCCATGTCGTGGGTCCGCCAAGCCCCTGGAAAAGGCCTGGAATGGGTG |
| | | TCCGCGATTTCCGGGAGCGGAGGTTCGACCTATTACGCCGACTCCGTG |
| | | AAGGGCCGCTTTACCATCTCCCGGGATAACTCCAAGAACACTCTGTAC |
| | | CTCCAAATGAACTCGCTGAGAGCCGAGGACACCGCCGTGTATTACTGC |
| | | GCGAAGGCGCTGGTCGGCGCGACTGGGGCATTCGACATCTGGGGACAG |
| | | GGAACTCTTGTGACCGTGTCGAGCGGAGGCGGCGGCTCCGGCGGAGGA |
| | | GGGAGCGGGGGCGGTGGTTCCGAAATCGTGTTGACTCAGTCCCCGGGA |
| | | ACCCTGAGCTTGTCACCCGGGGAGCGGGCCACTCTCTCCTGTCGCGCC |
| | | TCCCAATCGCTCTCATCCAATTTCCTGGCCTGGTACCAGCAGAAGCCC |
| | | GGACAGGCCCCGGGCCTGCTCATCTACGGCGCTTCAAACTGGGCAACG |
| | | GGAACCCCTGATCGGTTCAGCGGAAGCGGATCGGGTACTGACTTTACC |
| | | CTGACCATCACCAGACTGGAACCGGAGGACTTCGCCGTGTACTACTGC |
| | | CAGTACTACGGCACCTCCCCCATGTACACATTCGGACAGGGTACCAAG |
| | | GTCGAGATTAAG |
| BCMA_EBB- | 1161 | EVQLLETGGGLVQPGGSLRLSCAASGFSFSSYAMSWVRQAPGKGLEWV |
| C1978-D4-aa | | SAISGSGGSTYYADSVKGRFTISRDNSKNTLYLQMNSLRAEDTAVYYC |
| VH | | AKALVGATGAFDIWGQGTLVTVSS |
| BCMA_EBB- | 1162 | EIVLTQSPGTLSLSPGERATLSCRASQSLSSNFLAWYQQKPGQAPGLL |
| C1978-D4-aa | | IYGASNWATGTPDRFSGSGSGTDFTLTITRLEPEDFAVYYCQYYGTSP |
| VL | | MYTFGQGTKVEIK |
| BCMA_EBB- | 1163 | MALPVTALLLPLALLLHAARPEVQLLETGGGLVQPGGSLRLSCAASGF |
| C1978-D4-aa | | SFSSYAMSWVRQAPGKGLEWVSAISGSGGSTYYADSVKGRFTISRDNS |
| Full CART | | KNTLYLQMNSLRAEDTAVYYCAKALVGATGAFDIWGQGTLVTVSSGGG |
| | | GSGGGGSGGGGSEIVLTQSPGTLSLSPGERATLSCRASQSLSSNFLAW |
| | | YQQKPGQAPGLLIYGASNWATGTPDRFSGSGSGTDFTLTITRLEPEDF |
| | | AVYYCQYYGTSPMYTFGQGTKVEIKTTTPAPRPPTPAPTIASQPLSLR |
| | | PEACRPAAGGAVHTRGLDFACDIYIWAPLAGTCGVLLLSLVITLYCKR |
| | | GRKKLLYIFKQPFMRPVQTTQEEDGCSCRFPEEEEGGCELRVKFSRSA |
| | | DAPAYKQGQNQLYNELNLGRREEYDVLDKRRGRDPEMGGKPRRKNPQE |
| | | GLYNELQKDKMAEAYSEIGMKGERRRGKGHDGLYQGLSTATKDTYDAL |
| | | HMQALPPR |
| BCMA_EBB- | 1164 | ATGGCCCTCCCTGTCACCGCCCTGCTGCTTCCGCTGGCTCTTCTGCTC |
| C1978-D4-nt | | CACGCCGCTCGGCCCGAAGTGCAGCTGCTCGAAACCGGTGGAGGGCTG |
| Full CART | | GTGCAGCCAGGGGGCTCCCTGAGGCTTTCATGCGCCGCTAGCGGATTC |
| | | TCCTTCTCCTCTTACGCCATGTCGTGGGTCCGCCAAGCCCCTGGAAAA |
| | | GGCCTGGAATGGGTGTCCGCGATTTCCGGGAGCGGAGGTTCGACCTAT |
| | | TACGCCGACTCCGTGAAGGGCCGCTTTACCATCTCCCGGGATAACTCC |
| | | AAGAACACTCTGTACCTCCAAATGAACTCGCTGAGAGCCGAGGACACC |
| | | GCCGTGTATTACTGCGCGAAGGCGCTGGTCGGCGCGACTGGGGCATTC |
| | | GACATCTGGGGACAGGGAACTCTTGTGACCGTGTCGAGCGGAGGCGGC |
| | | GGCTCCGGCGGAGGAGGGAGCGGGGGCGGTGGTTCCGAAATCGTGTTG |
| | | ACTCAGTCCCCGGGAACCCTGAGCTTGTCACCCGGGGAGCGGGCCACT |
| | | CTCTCCTGTCGCGCCTCCCAATCGCTCTCATCCAATTTCCTGGCCTGG |
| | | TACCAGCAGAAGCCCGGACAGGCCCCGGGCCTGCTCATCTACGGCGCT |
| | | TCAAACTGGGCAACGGGAACCCCTGATCGGTTCAGCGGAAGCGGATCG |
| | | GGTACTGACTTTACCCTGACCATCACCAGACTGGAACCGGAGGACTTC |
| | | GCCGTGTACTACTGCCAGTACTACGGCACCTCCCCCATGTACACATTC |
| | | GGACAGGGTACCAAGGTCGAGATTAAGACCACTACCCCAGCACCGAGG |
| | | CCACCCACCCCGGCTCCTACCATCGCCTCCCAGCCTCTGTCCCTGCGT |
| | | CCGGAGGCATGTAGACCCGCAGCTGGTGGGGCCGTGCATACCCGGGGT |
| | | CTTGACTTCGCCTGCGATATCTACATTTGGGCCCCTCTGGCTGGTACT |
| | | TGCGGGGTCCTGCTGCTTTCACTCGTGATCACTCTTTACTGTAAGCGC |
| | | GGTCGGAAGAAGCTGCTGTACATCTTTAAGCAACCCTTCATGAGGCCT |
| | | GTGCAGACTACTCAAGAGGAGGACGGCTGTTCATGCCGGTTCCCAGAG |
| | | GAGGAGGAAGGCGGCTGCGAACTGCGCGTGAAATTCAGCCGCAGCGCA |
| | | GATGCTCCAGCCTACAAGCAGGGGCAGAACCAGCTCTACAACGAACTC |
| | | AATCTTGGTCGGAGAGAGGAGTACGACGTGCTGGACAAGCGGAGAGGA |
| | | CGGGACCCAGAAATGGGCGGGAAGCCGCGCAGAAAGAATCCCCAAGAG |
| | | GGCCTGTACAACGAGCTCCAAAAGGATAAGATGGCAGAAGCCTATAGC |
| | | GAGATTGGTATGAAAGGGGAACGCAGAAGAGGCAAAGGCCACGACGGA |
| | | CTGTACCAGGGACTCAGCACCGCCACCAAGGACACCTATGACGCTCTT |
| | | CACATGCAGGCCCTGCCGCCTCGG |

BCMA_EBB-C1980-A2

| | | |
|---|---|---|
| BCMA_EBB- | 1165 | EVQLLESGGGLVQPGGSLRLSCAASGFTFSSYAMSWVRQAPGKGLEWV |
| C1980-A2-aa | | SAISGSGGSTYYADSVKGRFTISRDNSKNTLYLQMNSLRAEDTAVYYC |
| ScFv domain | | VLWFGEGFDPWGQGTLVTVSSGGGGSGGGGSGGGGSDIVLTQSPLSLP |
| | | VTPGEPASISCRSSQSLLHSNGYNYLDWYLQKPGQSPQLLIYLGSNRA |
| | | SGVPDRFSGSGSGTDFTLKISRVEAEDVGVYYCMQALQTPLTFGGGTK |
| | | VDIK |
| BCMA_EBB- | 1166 | GAAGTGCAGCTGCTTGAGAGCGGTGGAGGTCTGGTGCAGCCCGGGGGA |
| C1980-A2-nt | | TCACTGCGCCTGTCCTGTGCCGCGTCCGGTTTCACTTTCTCCTCGTAC |
| ScFv domain | | GCCATGTCGTGGGTCAGACAGGCACCGGGAAAGGGACTGGAATGGGTG |
| | | TCAGCCATTTCGGGTTCGGGGGGCAGCACCTACTACGCTGACTCCGTG |
| | | AAGGGCCGGTTCACCATTTCCCGCGACAACTCCAAGAACACCTTGTAC |
| | | CTCCAAATGAACTCCCTGCGGGCCGAAGATACCGCCGTGTATTACTGC |
| | | GTGCTGTGGTTCGGAGAGGGATTCGACCCGTGGGGACAAGGAACACTC |
| | | GTGACTGTGTCATCCGGCGGAGGCGGCAGCGGTGGCGGCGGTTCCGGC |
| | | GGCGGCGGATCTGACATCGTGTTGACCCAGTCCCCTCTGAGCCTGCCG |
| | | GTCACTCCTGGCGAACCAGCCAGCATCTCCTGCCGGTCGAGCCAGTCC |
| | | CTCCTGCACTCCAATGGGTACAACTACCTCGATTGGTATCTGCAAAAG |
| | | CCGGGCCAGAGCCCCCAGCTGCTGATCTACCTTGGGTCAAACCGCGCT |
| | | TCCGGGGTGCCTGATAGATTCTCCGGGTCCGGGAGCGGAACCGACTTT |
| | | ACCCTGAAAATCTCGAGGGTGGAGGCCGAGGACGTCGGAGTGTACTAC |
| | | TGCATGCAGGCGCTCCAGACTCCCCTGACCTTCGGAGGAGGAACGAAG |
| | | GTCGACATCAAGA |
| BCMA_EBB- | 1167 | EVQLLESGGGLVQPGGSLRLSCAASGFTFSSYAMSWVRQAPGKGLEWV |
| C1980-A2-aa | | SAISGSGGSTYYADSVKGRFTISRDNSKNTLYLQMNSLRAEDTAVYYC |
| VH | | VLWFGEGFDPWGQGTLVTVSS |
| BCMA_EBB- | 1168 | DIVLTQSPLSLPVTPGEPASISCRSSQSLLHSNGYNYLDWYLQKPGQS |
| C1980-A2-aa | | PQLLIYLGSNRASGVPDRFSGSGSGTDFTLKISRVEAEDVGVYYCMQA |
| VL | | LQTPLTFGGGTKVDIK |
| BCMA_EBB- | 1169 | MALPVTALLLPLALLLHAARPEVQLLESGGGLVQPGGSLRLSCAASGF |
| C1980-A2-aa | | TFSSYAMSWVRQAPGKGLEWVSAISGSGGSTYYADSVKGRFTISRDNS |
| Full CART | | KNTLYLQMNSLRAEDTAVYYCVLWFGEGFDPWGQGTLVTVSSGGGGSG |
| | | GGGSGGGGSDIVLTQSPLSLPVTPGEPASISCRSSQSLLHSNGYNYLD |
| | | WYLQKPGQSPQLLIYLGSNRASGVPDRFSGSGSGTDFTLKISRVEAED |
| | | VGVYYCMQALQTPLTFGGGTKVDIKTTTPAPRPPTPAPTIASQPLSLR |
| | | PEACRPAAGGAVHTRGLDFACDIYIWAPLAGTCGVLLLSLVITLYCKR |
| | | GRKKLLYIFKQPFMRPVQTTQEEDGCSCRFPEEEEGGCELRVKFSRSA |
| | | DAPAYKQGQNQLYNELNLGRREEYDVLDKRRGRDPEMGGKPRRKNPQE |
| | | GLYNELQKDKMAEAYSEIGMKGERRRGKGHDGLYQGLSTATKDTYDAL |
| | | HMQALPPR |
| BCMA_EBB- | 1170 | ATGGCCCTCCCTGTCACCGCCCTGCTGCTTCCGCTGGCTCTTCTGCTC |
| C1980-A2-nt | | CACGCCGCTCGGCCCGAAGTGCAGCTGCTTGAGAGCGGTGGAGGTCTG |
| Full CART | | GTGCAGCCCGGGGGATCACTGCGCCTGTCCTGTGCCGCGTCCGGTTTC |
| | | ACTTTCTCCTCGTACGCCATGTCGTGGGTCAGACAGGCACCGGGAAAG |
| | | GGACTGGAATGGGTGTCAGCCATTTCGGGTTCGGGGGGCAGCACCTAC |
| | | TACGCTGACTCCGTGAAGGGCCGGTTCACCATTTCCCGCGACAACTCC |
| | | AAGAACACCTTGTACCTCCAAATGAACTCCCTGCGGGCCGAAGATACC |
| | | GCCGTGTATTACTGCGTGCTGTGGTTCGGAGAGGGATTCGACCCGTGG |
| | | GGACAAGGAACACTCGTGACTGTGTCATCCGGCGGAGGCGGCAGCGGT |
| | | GGCGGCGGTTCCGGCGGCGGCGGATCTGACATCGTGTTGACCCAGTCC |
| | | CCTCTGAGCCTGCCGGTCACTCCTGGCGAACCAGCCAGCATCTCCTGC |
| | | CGGTCGAGCCAGTCCCTCCTGCACTCCAATGGGTACAACTACCTCGAT |
| | | TGGTATCTGCAAAAGCCGGGCCAGAGCCCCCAGCTGCTGATCTACCTT |
| | | GGGTCAAACCGCGCTTCCGGGGTGCCTGATAGATTCTCCGGGTCCGGG |
| | | AGCGGAACCGACTTTACCCTGAAAATCTCGAGGGTGGAGGCCGAGGAC |
| | | GTCGGAGTGTACTACTGCATGCAGGCGCTCCAGACTCCCCTGACCTTC |
| | | GGAGGAGGAACGAAGGTCGACATCAAGACCACTACCCCAGCACCGAGG |
| | | CCACCCACCCCGGCTCCTACCATCGCCTCCCAGCCTCTGTCCCTGCGT |
| | | CCGGAGGCATGTAGACCCGCAGCTGGTGGGGCCGTGCATACCCGGGGT |
| | | CTTGACTTCGCCTGCGATATCTACATTTGGGCCCCTCTGGCTGGTACT |
| | | TGCGGGGTCCTGCTGCTTTCACTCGTGATCACTCTTTACTGTAAGCGC |
| | | GGTCGGAAGAAGCTGCTGTACATCTTTAAGCAACCCTTCATGAGGCCT |
| | | GTGCAGACTACTCAAGAGGAGGACGGCTGTTCATGCCGGTTCCCAGAG |
| | | GAGGAGGAAGGCGGCTGCGAACTGCGCGTGAAATTCAGCCGCAGCGCA |
| | | GATGCTCCAGCCTACAAGCAGGGGCAGAACCAGCTCTACAACGAACTC |
| | | AATCTTGGTCGGAGAGAGGAGTACGACGTGCTGGACAAGCGGAGAGGA |
| | | CGGGACCCAGAAATGGGCGGGAAGCCGCGCAGAAAGAATCCCCAAGAG |
| | | GGCCTGTACAACGAGCTCCAAAAGGATAAGATGGCAGAAGCCTATAGC |
| | | GAGATTGGTATGAAAGGGGAACGCAGAAGAGGCAAAGGCCACGACGGA |
| | | CTGTACCAGGGACTCAGCACCGCCACCAAGGACACCTATGACGCTCTT |
| | | CACATGCAGGCCCTGCCGCCTCGG |

BCMA_EBB-C1981-C3

| | | |
|---|---|---|
| BCMA_EBB- | 1171 | QVQLVESGGGLVQPGGSLRLSCAASGFTFSSYAMSWVRQAPGKGLEWV |
| C1981-C3-aa | | SAISGSGGSTYYADSVKGRFTISRDNSKNTLYLQMNSLRAEDTAVYYC |
| ScFv domain | | AKVGYDSSGYYRDYYGMDVWGQGTTVTVSSGGGGSGGGGSGGGGSEIV |
| | | LTQSPGTLSLSPGERATLSCRASQSVSSSYLAWYQQKPGQAPRLLIYG |
| | | TSSRATGISDRFSGSGSGTDFTLTISRLEPEDFAVYYCQHYGNSPPKF |
| | | TFGPGTKLEIK |
| BCMA_EBB- | 1172 | CAAGTGCAGCTCGTGGAGTCAGGCGGAGGACTGGTGCAGCCCGGGGGC |
| C1981-C3-nt | | TCCCTGAGACTTTCCTGCGCGGCATCGGGTTTTACCTTCTCCTCCTAT |
| ScFv domain | | GCTATGTCCTGGGTGCGCCAGGCCCCGGGAAAGGGACTGGAATGGGTG |
| | | TCCGCAATCAGCGGTAGCGGGGGCTCAACATACTACGCCGACTCCGTC |
| | | AAGGGTCGCTTCACTATTTCCCGGGACAACTCCAAGAATACCCTGTAC |
| | | CTCCAAATGAACAGCCTCAGGGCCGAGGATACTGCCGTGTACTACTGC |
| | | GCCAAAGTCGGATACGATAGCTCCGGTTACTACCGGGACTACTACGGA |
| | | ATGGACGTGTGGGGACAGGGCACCACCGTGACCGTGTCAAGCGGCGGA |
| | | GGCGGTTCAGGAGGGGGAGGCTCCGGCGGTGGAGGGTCCGAAATCGTC |
| | | CTGACTCAGTCGCCTGGCACTCTGTCGTTGTCCCCGGGGGAGCGCGCT |
| | | ACCCTGTCGTGTCGGGCGTCGCAGTCCGTGTCGAGCTCCTACCTCGCG |
| | | TGGTACCAGCAGAAGCCCGGACAGGCCCCTAGACTTCTGATCTACGGC |
| | | ACTTCTTCACGCGCCACCGGGATCAGCGACAGGTTCAGCGGCTCCGGC |
| | | TCCGGGACCGACTTCACCCTGACCATTAGCCGGCTGGAGCCTGAAGAT |
| | | TTCGCCGTGTATTACTGCCAACACTACGGAAACTCGCCGCCAAAGTTC |
| | | ACGTTCGGACCCGGAACCAAGCTGGAAATCAAG |
| BCMA_EBB- | 1173 | QVQLVESGGGLVQPGGSLRLSCAASGFTFSSYAMSWVRQAPGKGLEWV |
| C1981-C3-aa | | SAISGSGGSTYYADSVKGRFTISRDNSKNTLYLQMNSLRAEDTAVYYC |
| VH | | AKVGYDSSGYYRDYYGMDVWGQGTTVTVSS |
| BCMA_EBB- | 1174 | EIVLTQSPGTLSLSPGERATLSCRASQSVSSSYLAWYQQKPGQAPRLL |
| C1981-C3-aa | | IYGTSSRATGISDRFSGSGSGTDFTLTISRLEPEDFAVYYCQHYGNSP |
| VL | | PKFTFGPGTKLEIK |
| BCMA_EBB- | 1175 | MALPVTALLLPLALLLHAARPQVQLVESGGGLVQPGGSLRLSCAASGF |
| C1981-C3-aa | | TFSSYAMSWVRQAPGKGLEWVSAISGSGGSTYYADSVKGRFTISRDNS |
| Full CART | | KNTLYLQMNSLRAEDTAVYYCAKVGYDSSGYYRDYYGMDVWGQGTTVT |
| | | VSSGGGGSGGGGSGGGGSEIVLTQSPGTLSLSPGERATLSCRASQSVS |
| | | SSYLAWYQQKPGQAPRLLIYGTSSRATGISDRFSGSGSGTDFTLTISR |
| | | LEPEDFAVYYCQHYGNSPPKFTFGPGTKLEIKTTTPAPRPPTPAPTIA |
| | | SQPLSLRPEACRPAAGGAVHTRGLDFACDIYIWAPLAGTCGVLLLSLV |
| | | ITLYCKRGRKKLLYIFKQPFMRPVQTTQEEDGCSCRFPEEEEGGCELR |
| | | VKFSRSADAPAYKQGQNQLYNELNLGRREEYDVLDKRRGRDPEMGGKP |
| | | RRKNPQEGLYNELQKDKMAEAYSEIGMKGERRRGKGHDGLYQGLSTAT |
| | | KDTYDALHMQALPPR |
| BCMA_EBB- | 1176 | ATGGCCCTCCCTGTCACCGCCCTGCTGCTTCCGCTGGCTCTTCTGCTC |
| C1981-C3-nt | | CACGCCGCTCGGCCCCAAGTGCAGCTCGTGGAGTCAGGCGGAGGACTG |
| Full CART | | GTGCAGCCCGGGGGCTCCCTGAGACTTTCCTGCGCGGCATCGGGTTTT |
| | | ACCTTCTCCTCCTATGCTATGTCCTGGGTGCGCCAGGCCCCGGGAAAG |
| | | GGACTGGAATGGGTGTCCGCAATCAGCGGTAGCGGGGGCTCAACATAC |
| | | TACGCCGACTCCGTCAAGGGTCGCTTCACTATTTCCCGGGACAACTCC |
| | | AAGAATACCCTGTACCTCCAAATGAACAGCCTCAGGGCCGAGGATACT |
| | | GCCGTGTACTACTGCGCCAAAGTCGGATACGATAGCTCCGGTTACTAC |
| | | CGGGACTACTACGGAATGGACGTGTGGGGACAGGGCACCACCGTGACC |
| | | GTGTCAAGCGGCGGAGGCGGTTCAGGAGGGGGAGGCTCCGGCGGTGGA |
| | | GGGTCCGAAATCGTCCTGACTCAGTCGCCTGGCACTCTGTCGTTGTCC |
| | | CCGGGGGAGCGCGCTACCCTGTCGTGTCGGGCGTCGCAGTCCGTGTCG |
| | | AGCTCCTACCTCGCGTGGTACCAGCAGAAGCCCGGACAGGCCCCTAGA |
| | | CTTCTGATCTACGGCACTTCTTCACGCGCCACCGGGATCAGCGACAGG |
| | | TTCAGCGGCTCCGGCTCCGGGACCGACTTCACCCTGACCATTAGCCGG |
| | | CTGGAGCCTGAAGATTTCGCCGTGTATTACTGCCAACACTACGGAAAC |
| | | TCGCCGCCAAAGTTCACGTTCGGACCCGGAACCAAGCTGGAAATCAAG |
| | | ACCACTACCCCAGCACCGAGGCCACCCACCCCGGCTCCTACCATCGCC |
| | | TCCCAGCCTCTGTCCCTGCGTCCGGAGGCATGTAGACCCGCAGCTGGT |
| | | GGGGCCGTGCATACCCGGGGTCTTGACTTCGCCTGCGATATCTACATT |
| | | TGGGCCCCTCTGGCTGGTACTTGCGGGGTCCTGCTGCTTTCACTCGTG |
| | | ATCACTCTTTACTGTAAGCGCGGTCGGAAGAAGCTGCTGTACATCTTT |
| | | AAGCAACCCTTCATGAGGCCTGTGCAGACTACTCAAGAGGAGGACGGC |
| | | TGTTCATGCCGGTTCCCAGAGGAGGAGGAAGGCGGCTGCGAACTGCGC |
| | | GTGAAATTCAGCCGCAGCGCAGATGCTCCAGCCTACAAGCAGGGGCAG |
| | | AACCAGCTCTACAACGAACTCAATCTTGGTCGGAGAGAGGAGTACGAC |
| | | GTGCTGGACAAGCGGAGAGGACGGGACCCAGAAATGGGCGGGAAGCCG |
| | | CGCAGAAAGAATCCCCAAGAGGGCCTGTACAACGAGCTCCAAAAGGAT |
| | | AAGATGGCAGAAGCCTATAGCGAGATTGGTATGAAAGGGGAACGCAGA |
| | | AGAGGCAAAGGCCACGACGGACTGTACCAGGGACTCAGCACCGCCACC |
| | | AAGGACACCTATGACGCTCTTCACATGCAGGCCCTGCCGCCTCGG |

BCMA_EBB-C1978-G4

| | | |
|---|---|---|
| BCMA_EBB- | 1177 | EVQLVESGGGLVQPGGSLRLSCAASGFTFSSYAMSWVRQAPGKGLEWV |
| C1978-G4-aa | | SAISGSGGSTYYADSVKGRFTISRDNSKNTLYLQMNSLRAEDTAVYYC |
| ScFv domain | | AKMGWSSGYLGAFDIWGQGTTVTVSSGGGGSGGGGSGGGGSEIVLTQS |
| | | PGTLSLSPGERATLSCRASQSVASSFLAWYQQKPGQAPRLLIYGASGR |
| | | ATGIPDRFSGSGSGTDFTLTISRLEPEDFAVYYCQHYGGSPRLTFGGG |
| | | TKVDIK |
| BCMA_EBB- | 1178 | GAAGTCCAACTGGTGGAGTCCGGGGGAGGGCTCGTGCAGCCCGGAGGC |
| C1978-G4-nt | | AGCCTTCGGCTGTCGTGCGCCGCCTCCGGGTTCACGTTCTCATCCTAC |
| ScFv domain | | GCGATGTCGTGGGTCAGACAGGCACCAGGAAAGGGACTGGAATGGGTG |
| | | TCCGCCATTAGCGGCTCCGGCGGTAGCACCTACTATGCCGACTCAGTG |
| | | AAGGGAAGGTTCACTATCTCCCGCGACAACAGCAAGAACACCCTGTAC |
| | | CTCCAAATGAACTCTCTGCGGGCCGAGGATACCGCGGTGTACTATTGC |
| | | GCCAAGATGGGTTGGTCCAGCGGATACTTGGGAGCCTTCGACATTTGG |
| | | GGACAGGGCACTACTGTGACCGTGTCCTCCGGGGGTGGCGGATCGGGA |
| | | GGCGGCGGCTCGGGTGGAGGGGGTTCCGAAATCGTGTTGACCCAGTCA |
| | | CCGGGAACCCTCTCGCTGTCCCCGGGAGAACGGGCTACACTGTCATGT |
| | | AGAGCGTCCCAGTCCGTGGCTTCCTCGTTCCTGGCCTGGTACCAGCAG |
| | | AAGCCGGGACAGGCACCCCGCCTGCTCATCTACGGAGCCAGCGGCCGG |
| | | GCGACCGGCATCCCTGACCGCTTCTCCGGTTCCGGCTCGGGCACCGAC |
| | | TTTACTCTGACCATTAGCAGGCTTGAGCCCGAGGATTTTGCCGTGTAC |
| | | TACTGCCAACACTACGGGGGGAGCCCTCGCCTGACCTTCGGAGGCGGA |
| | | ACTAAGGTCGATATCAAAA |
| BCMA_EBB- | 1179 | EVQLVESGGGLVQPGGSLRLSCAASGFTFSSYAMSWVRQAPGKGLEWV |
| C1978-G4-aa | | SAISGSGGSTYYADSVKGRFTISRDNSKNTLYLQMNSLRAEDTAVYYC |
| VH | | AKMGWSSGYLGAFDIWGQGTTVTVSS |
| BCMA_EBB- | 1180 | EIVLTQSPGTLSLSPGERATLSCRASQSVASSFLAWYQQKPGQAPRLL |
| C1978-G4-aa | | IYGASGRATGIPDRFSGSGSGTDFTLTISRLEPEDFAVYYCQHYGGSP |
| VL | | RLTFGGGTKVDIK |
| BCMA_EBB- | 1181 | MALPVTALLLPLALLLHAARPEVQLVESGGGLVQPGGSLRLSCAASGF |
| C1978-G4-aa | | TFSSYAMSWVRQAPGKGLEWVSAISGSGGSTYYADSVKGRFTISRDNS |
| Full CART | | KNTLYLQMNSLRAEDTAVYYCAKMGWSSGYLGAFDIWGQGTTVTVSSG |
| | | GGGSGGGGSGGGGSEIVLTQSPGTLSLSPGERATLSCRASQSVASSFL |
| | | AWYQQKPGQAPRLLIYGASGRATGIPDRFSGSGSGTDFTLTISRLEPE |
| | | DFAVYYCQHYGGSPRLTFGGGTKVDIKTTTPAPRPPTPAPTIASQPLS |
| | | LRPEACRPAAGGAVHTRGLDFACDIYIWAPLAGTCGVLLLSLVITLYC |
| | | KRGRKKLLYIFKQPFMRPVQTTQEEDGCSCRFPEEEEGGCELRVKFSR |
| | | SADAPAYKQGQNQLYNELNLGRREEYDVLDKRRGRDPEMGGKPRRKNP |
| | | QEGLYNELQKDKMAEAYSEIGMKGERRRGKGHDGLYQGLSTATKDTYD |
| | | ALHMQALPPR |
| BCMA_EBB- | 1182 | ATGGCCCTCCCTGTCACCGCCCTGCTGCTTCCGCTGGCTCTTCTGCTC |
| C1978-G4-nt | | CACGCCGCTCGGCCCGAAGTCCAACTGGTGGAGTCCGGGGGAGGGCTC |
| Full CART | | GTGCAGCCCGGAGGCAGCCTTCGGCTGTCGTGCGCCGCCTCCGGGTTC |
| | | ACGTTCTCATCCTACGCGATGTCGTGGGTCAGACAGGCACCAGGAAAG |
| | | GGACTGGAATGGGTGTCCGCCATTAGCGGCTCCGGCGGTAGCACCTAC |
| | | TATGCCGACTCAGTGAAGGGAAGGTTCACTATCTCCCGCGACAACAGC |
| | | AAGAACACCCTGTACCTCCAAATGAACTCTCTGCGGGCCGAGGATACC |
| | | GCGGTGTACTATTGCGCCAAGATGGGTTGGTCCAGCGGATACTTGGGA |
| | | GCCTTCGACATTTGGGGACAGGGCACTACTGTGACCGTGTCCTCCGGG |
| | | GGTGGCGGATCGGGAGGCGGCGGCTCGGGTGGAGGGGGTTCCGAAATC |
| | | GTGTTGACCCAGTCACCGGGAACCCTCTCGCTGTCCCCGGGAGAACGG |
| | | GCTACACTGTCATGTAGAGCGTCCCAGTCCGTGGCTTCCTCGTTCCTG |
| | | GCCTGGTACCAGCAGAAGCCGGGACAGGCACCCCGCCTGCTCATCTAC |
| | | GGAGCCAGCGGCCGGGCGACCGGCATCCCTGACCGCTTCTCCGGTTCC |
| | | GGCTCGGGCACCGACTTTACTCTGACCATTAGCAGGCTTGAGCCCGAG |
| | | GATTTTGCCGTGTACTACTGCCAACACTACGGGGGGAGCCCTCGCCTG |
| | | ACCTTCGGAGGCGGAACTAAGGTCGATATCAAAACCACTACCCCAGCA |
| | | CCGAGGCCACCCACCCCGGCTCCTACCATCGCCTCCCAGCCTCTGTCC |
| | | CTGCGTCCGGAGGCATGTAGACCCGCAGCTGGTGGGGCCGTGCATACC |
| | | CGGGGTCTTGACTTCGCCTGCGATATCTACATTTGGGCCCCTCTGGCT |
| | | GGTACTTGCGGGGTCCTGCTGCTTTCACTCGTGATCACTCTTTACTGT |
| | | AAGCGCGGTCGGAAGAAGCTGCTGTACATCTTTAAGCAACCCTTCATG |
| | | AGGCCTGTGCAGACTACTCAAGAGGAGGACGGCTGTTCATGCCGGTTC |
| | | CCAGAGGAGGAGGAAGGCGGCTGCGAACTGCGCGTGAAATTCAGCCGC |
| | | AGCGCAGATGCTCCAGCCTACAAGCAGGGGCAGAACCAGCTCTACAAC |
| | | GAACTCAATCTTGGTCGGAGAGAGGAGTACGACGTGCTGGACAAGCGG |
| | | AGAGGACGGGACCCAGAAATGGGCGGGAAGCCGCGCAGAAAGAATCCC |
| | | CAAGAGGGCCTGTACAACGAGCTCCAAAAGGATAAGATGGCAGAAGCC |
| | | TATAGCGAGATTGGTATGAAAGGGGAACGCAGAAGAGGCAAAGGCCAC |
| | | GACGGACTGTACCAGGGACTCAGCACCGCCACCAAGGACACCTATGAC |
| | | GCTCTTCACATGCAGGCCCTGCCGCCTCGG |

TABLE 11B
Additional exemplary BCMA CAR sequences

| | | SEQ |
|---|---|---|
| | | ID |
| Name | Sequence | NO: |
| A7D12.2 | QIQLVQSGPDLKKPGETVKLSCKASGYTFTNFGMNWVKQAPGKGFKWMAWINTYTGESYFA | 1183 |
| VH | DDFKGRFAFSVETSATTAYLQINNLKTEDTATYFCARGEIYYGYDGGFAYWGQGTLVTVSA | |
| A7D12.2 | DVVMTQSHRFMSTSVGDRVSITCRASQDVNTAVSWYQQKPGQSPKLLIFSASYRYTGVPDR | 1184 |
| VL | FTGSGSGADFTLTISSVQAEDLAVYYCQQHYSTPWTFGGGTKLDIK | |
| A7D12.2 | QIQLVQSGPDLKKPGETVKLSCKASGYTFTNFGMNWVKQAPGKGFKWMAWINTYTGESYFA | 1185 |
| scFv | DDFKGRFAFSVETSATTAYLQINNLKTEDTATYFCARGEIYYGYDGGFAYWGQGTLVTVSA | |
| domain | GGGGSGGGGSGGGGSDVVMTQSHRFMSTSVGDRVSITCRASQDVNTAVSWYQQKPGQSPKL | |
| | LIFSASYRYTGVPDRFTGSGSGADFTLTISSVQAEDLAVYYCQQHYSTPWTFGGGTKLDIK | |
| A7D12.2 | QIQLVQSGPDLKKPGETVKLSCKASGYTFTNFGMNWVKQAPGKGFKWMAWINTYTGESYFA | 1186 |
| Full | DDFKGRFAFSVETSATTAYLQINNLKTEDTATYFCARGEIYYGYDGGFAYWGQGTLVTVSA | |
| CART | GGGGSGGGGSGGGGSDVVMTQSHRFMSTSVGDRVSITCRASQDVNTAVSWYQQKPGQSPKL | |
| | LIFSASYRYTGVPDRFTGSGSGADFTLTISSVQAEDLAVYYCQQHYSTPWTFGGGTKLDIK | |
| | TTTPAPRPPTPAPTIASQPLSLRPEACRPAAGGAVHTRGLDFACDIYIWAPLAGTCGVLLL | |
| | SLVITLYCKRGRKKLLYIFKQPFMRPVQTTQEEDGCSCRFPEEEEGGCELRVKFSRSADAP | |
| | AYKQGQNQLYNELNLGRREEYDVLDKRRGRDPEMGGKPRRKNPQEGLYNELQKDKMAEAYS | |
| | EIGMKGERRRGKGHDGLYQGLSTATKDTYDALHMQALPPR | |
| C11D5.3 | QIQLVQSGPELKKPGETVKISCKASGYTFTDYSINWVKRAPGKGLKWMGWINTETREPAYA | 1187 |
| VH | YDFRGRFAFSLETSASTAYLQINNLKYEDTATYFCALDYSYAMDYWGQGTSVTVSS | |
| C11D5.3 | DIVLTQSPASLAMSLGKRATISCRASESVSVIGAHLIHWYQQKPGQPPKLLIYLASNLETG | 1188 |
| VL | VPARFSGSGSGTDFTLTIDPVEEDDVAIYSCLQSRIFPRTFGGGTKLEIK | |
| C11D5.3 | QIQLVQSGPELKKPGETVKISCKASGYTFTDYSINWVKRAPGKGLKWMGWINTETREPAYA | 1189 |
| scFv | YDFRGRFAFSLETSASTAYLQINNLKYEDTATYFCALDYSYAMDYWGQGTSVTVSSGGGGS | |
| domain | GGGGSGGGGSQIQLVQSGPELKKPGETVKISCKASGYTFTDYSINWVKRAPGKGLKWMGWI | |
| | NTETREPAYAYDFRGRFAFSLETSASTAYLQINNLKYEDTATYFCALDYSYAMDYWGQGTS | |
| | VTVSS | |
| C11D5.3 | QIQLVQSGPELKKPGETVKISCKASGYTFTDYSINWVKRAPGKGLKWMGWINTETREPAYA | 1190 |
| Full | YDFRGRFAFSLETSASTAYLQINNLKYEDTATYFCALDYSYAMDYWGQGTSVTVSSGGGGS | |
| CART | GGGGSGGGGSQIQLVQSGPELKKPGETVKISCKASGYTFTDYSINWVKRAPGKGLKWMGWI | |
| | NTETREPAYAYDFRGRFAFSLETSASTAYLQINNLKYEDTATYFCALDYSYAMDYWGQGTS | |
| | VTVSSTTTPAPRPPTPAPTIASQPLSLRPEACRPAAGGAVHTRGLDFACDIYIWAPLAGTC | |
| | GVLLLSLVITLYCKRGRKKLLYIFKQPFMRPVQTTQEEDGCSCRFPEEEEGGCELRVKFSR | |
| | SADAPAYKQGQNQLYNELNLGRREEYDVLDKRRGRDPEMGGKPRRKNPQEGLYNELQKDKM | |
| | AEAYSEIGMKGERRRGKGHDGLYQGLSTATKDTYDALHMQALPPR | |
| C12A3.2 | QIQLVQSGPELKKPGETVKISCKASGYTFRHYSMNWVKQAPGKGLKWMGRINTESGVPIYA | 1191 |
| VH | DDFKGRFAFSVETSASTAYLVINNLKDEDTASYFCSNDYLYSLDFWGQGTALTVSS | |
| C12A3.2 | DIVLTQSPPSLAMSLGKRATISCRASESVTILGSHLIYWYQQKPGQPPTLLIQLASNVQTG | 1192 |
| VL | VPARFSGSGSRTDFTLTIDPVEEDDVAVYYCLQSRTIPRTFGGGTKLEIK | |
| C12A3.2 | QIQLVQSGPELKKPGETVKISCKASGYTFRHYSMNWVKQAPGKGLKWMGRINTESGVPIYA | 1193 |
| scFv | DDFKGRFAFSVETSASTAYLVINNLKDEDTASYFCSNDYLYSLDFWGQGTALTVSSGGGGS | |
| domain | GGGGSGGGGSDIVLTQSPPSLAMSLGKRATISCRASESVTILGSHLIYWYQQKPGQPPTLL | |
| | IQLASNVQTGVPARFSGSGSRTDFTLTIDPVEEDDVAVYYCLQSRTIPRTFGGGTKLEIK | |
| C12A3.2 | QIQLVQSGPELKKPGETVKISCKASGYTFRHYSMNWVKQAPGKGLKWMGRINTESGVPIYA | 1194 |
| Full | DDFKGRFAFSVETSASTAYLVINNLKDEDTASYFCSNDYLYSLDFWGQGTALTVSSGGGGS | |
| CART | GGGGSGGGGSDIVLTQSPPSLAMSLGKRATISCRASESVTILGSHLIYWYQQKPGQPPTLL | |
| | IQLASNVQTGVPARFSGSGSRTDFTLTIDPVEEDDVAVYYCLQSRTIPRTFGGGTKLEIKT | |
| | TTPAPRPPTPAPTIASQPLSLRPEACRPAAGGAVHTRGLDFACDIYIWAPLAGTCGVLLLS | |
| | LVITLYCKRGRKKLLYIFKQPFMRPVQTTQEEDGCSCRFPEEEEGGCELRVKFSRSADAPA | |
| | YKQGQNQLYNELNLGRREEYDVLDKRRGRDPEMGGKPRRKNPQEGLYNELQKDKMAEAYSE | |
| | IGMKGERRRGKGHDGLYQGLSTATKDTYDALHMQALPPR | |
| C13F12.1 | QIQLVQSGPELKKPGETVKISCKASGYTFTHYSMNWVKQAPGKGLKWMGRINTETGEPLYA | 1195 |
| VH | DDFKGRFAFSLETSASTAYLVINNLKNEDTATFFCSNDYLYSCDYWGQGTTLTVSS | |
| C13F12.1 | DIVLTQSPPSLAMSLGKRATISCRASESVTILGSHLIYWYQQKPGQPPTLLIQLASNVQTG | 1196 |
| VL | VPARFSGSGSRTDFTLTIDPVEEDDVAVYYCLQSRTIPRTFGGGTKLEIK | |
| C13F12.1 | QIQLVQSGPELKKPGETVKISCKASGYTFTHYSMNWVKQAPGKGLKWMGRINTETGEPLYA | 1197 |
| scFv | DDFKGRFAFSLETSASTAYLVINNLKNEDTATFFCSNDYLYSCDYWGQGTTLTVSSGGGGS | |
| domain | GGGGSGGGGSDIVLTQSPPSLAMSLGKRATISCRASESVTILGSHLIYWYQQKPGQPPTLL | |
| | IQLASNVQTGVPARFSGSGSRTDFTLTIDPVEEDDVAVYYCLQSRTIPRTFGGGTKLEIK | |
| C13F12.1 | QIQLVQSGPELKKPGETVKISCKASGYTFTHYSMNWVKQAPGKGLKWMGRINTETGEPLYA | 1198 |
| Full | DDFKGRFAFSLETSASTAYLVINNLKNEDTATFFCSNDYLYSCDYWGQGTTLTVSSGGGGS | |
| CART | GGGGSGGGGSDIVLTQSPPSLAMSLGKRATISCRASESVTILGSHLIYWYQQKPGQPPTLL | |
| | IQLASNVQTGVPARFSGSGSRTDFTLTIDPVEEDDVAVYYCLQSRTIPRTFGGGTKLEIKT | |
| | TTPAPRPPTPAPTIASQPLSLRPEACRPAAGGAVHTRGLDFACDIYIWAPLAGTCGVLLLS | |
| | LVITLYCKRGRKKLLYIFKQPFMRPVQTTQEEDGCSCRFPEEEEGGCELRVKFSRSADAPA | |
| | YKQGQNQLYNELNLGRREEYDVLDKRRGRDPEMGGKPRRKNPQEGLYNELQKDKMAEAYSE | |
| | IGMKGERRRGKGHDGLYQGLSTATKDTYDALHMQALPPR | |

[0909] Exemplary BCMA CAR constructs disclose herein comprise an scFv (e.g., a scFv as disclosed in Tables 11 A or 11B, optionally preceded with an optional leader sequence (e.g., SEQ ID NO: 2 and SEQ ID NO: 3 or 1938 for exemplary leader amino acid and nucleotide sequences, respectively). The sequences of the scFv fragments (e.g., an ScFv from any of SEQ ID NOs: 967-1182, e.g., SEQ ID NOs: 967, 973, 979, 985, 991, 997, 1003, 1009, 1015, 1021, 1027, 1033, 1039, 1045, 1051, 1057, 1063, 1069, 1075, 1081, 1087, 1093, 1099, 1105, 1111, 1117, 1123, 1129, 1135, 1141, 1147, 1153, 1159, 1165, 1171, 1177, not including the optional leader sequence) are provided herein in Tables 11 A or 11B. The BCMA CAR construct can further include an optional hinge domain, e.g., a CD8 hinge domain (e.g., including the amino acid sequence of SEQ ID NO: 4 or encoded by a nucleic acid sequence of SEQ ID NO: 5); a transmembrane domain, e.g., a CD8 transmembrane domain (e.g., including the amino acid sequence of SEQ ID NO: 12 or encoded by the nucleotide sequence of SEQ ID NO: 13 or 1939); an intracellular domain, e.g., a 4-1BB intracellular domain (e.g., including the amino acid sequence of SEQ ID NO: 14 or encoded by the nucleotide sequence of SEQ ID NO: 15 or 1940; and a functional signaling domain, e.g., a CD3 zeta domain (e.g., including amino acid sequence of SEQ ID NO: 18 or 20, or encoded by the nucleotide sequence of SEQ ID NO: 19, 1941, or 21). In certain embodiments, the domains are contiguous with and in the same reading frame to form a single fusion protein. In other embodiments, the domain are in separate polypeptides, e.g., as in an RCAR molecule as described herein.

[0910] In certain embodiments, the full length BCMA CAR molecule includes the amino acid sequence of, or is encoded by the nucleotide sequence of, BCMA-1, BCMA-2, BCMA-3, BCMA-4, BCMA-5, BCMA-6, BCMA-7, BCMA-8, BCMA-9, BCMA-10, BCMA-11, BCMA-12, BCMA-13, BCMA-14, BCMA-15, 149362, 149363, 149364, 149365, 149366, 149367, 149368, 149369, BCMA_EBB-C1978-A4, BCMA_EBB-C1978-G1, BCMA_EBB-C1979-C1, BCMA_EBB-C1978-C7, BCMA_EBB-C1978-D10, BCMA_EBB-C1979-C12, BCMA_EBB-C1980-G4, BCMA_EBB-C1980-D2, BCMA_EBB-C1978-A10, BCMA_EBB-C1978-D4, BCMA_EBB-C1980-A2, BCMA_EBB-C1981-C3, BCMA_EBB-C1978-G4, A7D12.2, C11D5.3, C12A3.2, or C13F12.1 provided in Table 11A or 11B, or a sequence substantially (e.g., 85%, 95-99% or higher) identical thereto.

[0911] In certain embodiments, the BCMA CAR molecule, or the anti-BCMA antigen binding domain, includes the scFv amino acid sequence of BCMA-1, BCMA-2, BCMA-3, BCMA-4, BCMA-5, BCMA-6, BCMA-7, BCMA-8, BCMA-9, BCMA-10, BCMA-11, BCMA-12, BCMA-13, BCMA-14, BCMA-15, 149362, 149363, 149364, 149365, 149366, 149367, 149368, 149369, BCMA_EBB-C1978-A4, BCMA_EBB-C1978-G1, BCMA_EBB-C1979-C1, BCMA_EBB-C1978-C7, BCMA_EBB-C1978-D10, BCMA_EBB-C1979-C12, BCMA_EBB-C1980-G4, BCMA_EBB-C1980-D2, BCMA_EBB-C1978-A10, BCMA_EBB-C1978-D4, BCMA_EBB-C1980-A2, BCMA_EBB-C1981-C3, BCMA_EBB-C1978-G4, A7D12.2, C11D5.3, C12A3.2, or C13F12.1 provided in Table 11A or 11B (with or without the leader sequence), or a sequence substantially identical (e.g., 85%, 95-99% or higher identical, or up to 20, 15, 10, 8, 6, 5, 4, 3, 2, or 1 amino acid changes, e.g., substitutions (e.g., conservative substitutions)) to any of the aforesaid sequences.

[0912] In certain embodiments, the BCMA CAR molecule, or the anti-BCMA antigen binding domain, includes the heavy chain variable region and/or the light chain variable region of BCMA-1, BCMA-2, BCMA-3, BCMA-4, BCMA-5, BCMA-6, BCMA-7, BCMA-8, BCMA-9, BCMA-10, BCMA-11, BCMA-12, BCMA-13, BCMA-14, BCMA-15, 149362, 149363, 149364, 149365, 149366, 149367, 149368, 149369, BCMA_EBB-C1978-A4, BCMA_EBB-C1978-G1, BCMA_EBB-C1979-C1, BCMA_EBB-C1978-C7, BCMA_EBB-C1978-D10, BCMA_EBB-C1979-C12, BCMA_EBB-C1980-G4, BCMA_EBB-C1980-D2, BCMA_EBB-C1978-A10, BCMA_EBB-C1978-D4, BCMA_EBB-C1980-A2, BCMA_EBB-C1981-C3, BCMA_EBB-C1978-G4, A7D12.2, C11D5.3, C12A3.2, or C13F12.1 provided in Table 11 A or 11B, or a sequence substantially identical (e.g., 85%, 95-99% or higher identical, or up to 20, 15, 10, 8, 6, 5, 4, 3, 2, or 1 amino acid changes, e.g., substitutions (e.g., conservative substitutions)) to any of the aforesaid sequences.

[0913] In certain embodiments, the BCMA CAR molecule, or the anti-BCMA antigen binding domain, includes one, two or three CDRs from the heavy chain variable region (e.g., HCDR1, HCDR2 and/or HCDR3), provided in Table 12; and/or one, two or three CDRs from the light chain variable region (e.g., LCDR1, LCDR2 and/or LCDR3) of BCMA-1, BCMA-2, BCMA-3, BCMA-4, BCMA-5, BCMA-6, BCMA-7, BCMA-8, BCMA-9, BCMA-10, BCMA-11, BCMA-12, BCMA-13, BCMA-14, BCMA-15, 149362, 149363, 149364, 149365, 149366, 149367, 149368, 149369, BCMA_EBB-C1978-A4, BCMA_EBB-C1978-G1, BCMA_EBB-C1979-C1, BCMA_EBB-C1978-C7, BCMA_EBB-C1978-D10, BCMA_EBB-C1979-C12, BCMA_EBB-C1980-G4, BCMA_EBB-C1980-D2, BCMA_EBB-C1978-A10, BCMA_EBB-C1978-D4, BCMA_EBB-C1980-A2, BCMA_EBB-C1981-C3, BCMA_EBB-C1978-G4, A7D12.2, C11D5.3, C12A3.2, or C13F12.1, provided in Table 13; or a sequence substantially identical (e.g., 85%, 95-99% or higher identical, or up to 20, 15, 10, 8, 6, 5, 4, 3, 2, or 1 amino acid changes, e.g., substitutions (e.g., conservative substitutions)) to any of the aforesaid sequences.

[0914] In certain embodiments, the BCMA CAR molecule, or the anti-BCMA antigen binding domain, includes one, two or three CDRs from the heavy chain variable region (e.g., HCDR1, HCDR2 and/or HCDR3), provided in Table 14; and/or one, two or three CDRs from the light chain variable region (e.g., LCDR1, LCDR2 and/or LCDR3) of BCMA-1, BCMA-2, BCMA-3, BCMA-4, BCMA-5, BCMA-6, BCMA-7, BCMA-8, BCMA-9, BCMA-10, BCMA-11, BCMA-12, BCMA-13, BCMA-14, BCMA-15, 149362, 149363, 149364, 149365, 149366, 149367, 149368, 149369, BCMA_EBB-C1978-A4, BCMA_EBB-C1978-G1, BCMA_EBB-C1979-C1, BCMA_EBB-C1978-C7, BCMA_EBB-C1978-D10, BCMA_EBB-C1979-C12, BCMA_EBB-C1980-G4, BCMA_EBB-C1980-D2, BCMA_EBB-C1978-A10, BCMA_EBB-C1978-D4, BCMA_EBB-C1980-A2, BCMA_EBB-C1981-C3, BCMA_EBB-C1978-G4, A7D12.2, C11D5.3, C12A3.2, or C13F12.1, provided in Table 15; or a sequence substantially identical (e.g., 85%, 95-99% or higher identical, or up to 20, 15, 10, 8, 6, 5, 4, 3, 2, or 1 amino acid changes, e.g., substitutions (e.g., conservative substitutions)) to any of the aforesaid sequences.

[0915] In certain embodiments, the BCMA CAR molecule, or the anti-BCMA antigen binding domain, includes one, two or three CDRs from the heavy chain variable region (e.g., HCDR1, HCDR2 and/or HCDR3), provided in Table 16; and/or one, two or three CDRs from the light chain variable region (e.g., LCDR1, LCDR2 and/or LCDR3) of BCMA-1, BCMA-2, BCMA-3, BCMA-4, BCMA-5, BCMA-6, BCMA-7, BCMA-8, BCMA-9, BCMA-10, BCMA-11, BCMA-12, BCMA-13, BCMA-14, BCMA-15, 149362, 149363, 149364, 149365, 149366, 149367, 149368, 149369, BCMA_EBB-C1978-A4, BCMA_EBB-C1978-G1, BCMA_EBB-C1979-C1, BCMA_EBB-C1978-C7, BCMA_EBB-C1978-D10, BCMA_EBB-C1979-C12, BCMA_EBB-C1980-G4, BCMA_EBB-C1980-D2, BCMA_EBB-C1978-A10, BCMA_EBB-C1978-D4, BCMA_EBB-C1980-A2, BCMA_EBB-C1981-C3, BCMA_EBB-C1978-G4, A7D12.2, C11D5.3, C12A3.2, or C13F12.1, provided in Table 17; or a sequence substantially identical (e.g., 85%, 95-99% or higher identical, or up to 20, 15, 10, 8, 6, 5, 4, 3, 2, or 1 amino acid changes, e.g., substitutions (e.g., conservative substitutions)) to any of the aforesaid sequences.

[0916] The sequences of human CDR sequences of the scFv domains are shown in Tables 12, 14, and 16 for the heavy chain variable domains and in Tables 13, 15, and 17 for the light chain variable domains. “ID” stands for the respective SEQ ID NO for each CDR.

TABLE 12
Heavy Chain Variable Domain CDRs according to the Kabat
numbering scheme (Kabat et al. (1991), “Sequences of Proteins
of Immunological Interest,” 5th Ed. Public Health Service,
National Institutes of Health, Bethesda, MD)

| Candidate | HCDR1 | ID | HCDR2 | ID | HCDR3 | ID |
|---|---|---|---|---|---|---|
| 139109 | NHGMS | 1199 | GIVYSGSTYYAASVKG | 1239 | HGGESDV | 1279 |
| 139103 | NYAMS | 1200 | GISRSGENTYYADSVKG | 1240 | SPAHYYGGMDV | 1280 |
| 139105 | DYAMH | 1201 | GISWNSGSIGYADSVKG | 1241 | HSFLAY | 1281 |
| 139111 | NHGMS | 1202 | GIVYSGSTYYAASVKG | 1242 | HGGESDV | 1282 |
| 139100 | NFGIN | 1203 | WINPKNNNTNYAQKFQG | 1243 | GPYYYQSYMDV | 1283 |
| 139101 | SDAMT | 1204 | VISGSGGTTYYADSVKG | 1244 | LDSSGYYYARGPRY | 1284 |
| 139102 | NYGIT | 1205 | WISAYNGNTNYAQKFQG | 1245 | GPYYYYMDV | 1285 |
| 139104 | NHGMS | 1206 | GIVYSGSTYYAASVKG | 1246 | HGGESDV | 1286 |
| 139106 | NHGMS | 1207 | GIVYSGSTYYAASVKG | 1247 | HGGESDV | 1287 |
| 139107 | NHGMS | 1208 | GIVYSGSTYYAASVKG | 1248 | HGGESDV | 1288 |
| 139108 | DYYMS | 1209 | YISSSGSTIYYADSVKG | 1249 | ESGDGMDV | 1289 |
| 139110 | DYYMS | 1210 | YISSSGNTIYYADSVKG | 1250 | STMVREDY | 1290 |
| 139112 | NHGMS | 1211 | GIVYSGSTYYAASVKG | 1251 | HGGESDV | 1291 |
| 139113 | NHGMS | 1212 | GIVYSGSTYYAASVKG | 1252 | HGGESDV | 1292 |
| 139114 | NHGMS | 1213 | GIVYSGSTYYAASVKG | 1253 | HGGESDV | 1293 |
| 149362 | SSYYYWG | 1214 | SIYYSGSAYYNPSLKS | 1254 | HWQEWPDAFDI | 1294 |
| 149363 | TSGMCVS | 1215 | RIDWDEDKFYSTSLKT | 1255 | SGAGGTSATAFDI | 1295 |
| 149364 | SYSMN | 1216 | SISSSSSYIYYADSVKG | 1256 | TIAAVYAFDI | 1296 |
| 149365 | DYYMS | 1217 | YISSSGSTIYYADSVKG | 1257 | DLRGAFDI | 1297 |
| 149366 | SHYIH | 1218 | MINPSGGVTAYSQTLQG | 1258 | EGSGSGWYFDF | 1298 |
| 149367 | SGGYYWS | 1219 | YIYYSGSTYYNPSLKS | 1259 | AGIAARLRGAFDI | 1299 |
| 149368 | SYAIS | 1220 | GIIPIFGTANYAQKFQG | 1260 | RGGYQLLRWDVGLLR | 1300 |
| | | | | | SAFDI | |
| 149369 | SNSAAWN | 1221 | RTYYRSKWYSFYAISLKS | 1261 | SSPEGLFLYWFDP | 1301 |
| BCMA_EBB- | SYAMS | 1222 | AISGSGGSTYYADSVKG | 1262 | VEGSGSLDY | 1302 |
| C1978-A4 | | | | | | |
| BCMA_EBB- | RYPMS | 1223 | GISDSGVSTYYADSAKG | 1263 | RAGSEASDI | 1303 |
| C1978-G1 | | | | | | |
| BCMA_EBB- | SYAMS | 1224 | AISGSGGSTYYADSVKG | 1264 | ATYKRELRYYYGMDV | 1304 |
| C1979-C1 | | | | | | |
| BCMA_EBB- | SYAMS | 1225 | AISGSGGSTYYADSVKG | 1265 | ATYKRELRYYYGMDV | 1305 |
| C1978-C7 | | | | | | |
| BCMA_EBB- | DYAMH | 1226 | GISWNSGSIGYADSVKG | 1266 | VGKAVPDV | 1306 |
| C1978-D10 | | | | | | |
| BCMA_EBB- | DYAMH | 1227 | SINWKGNSLAYGDSVKG | 1267 | HQGVAYYNYAMDV | 1307 |
| C1979-C12 | | | | | | |
| BCMA_EBB- | SYAMS | 1228 | AISGSGGSTYYADSVKG | 1268 | VVRDGMDV | 1308 |
| C1980-G4 | | | | | | |
| BCMA_EBB- | SYAMS | 1229 | AISGSGGSTYYADSVKG | 1269 | IPQTGTFDY | 1309 |
| C1980-D2 | | | | | | |
| BCMA_EBB- | SYAMS | 1230 | AISGSGGSTYYADSVKG | 1270 | ANYKRELRYYYGMDV | 1310 |
| C1978-A10 | | | | | | |
| BCMA_EBB- | SYAMS | 1231 | AISGSGGSTYYADSVKG | 1271 | ALVGATGAFDI | 1311 |
| C1978-D4 | | | | | | |
| BCMA_EBB- | SYAMS | 1232 | AISGSGGSTYYADSVKG | 1272 | WFGEGFDP | 1312 |
| C1980-A2 | | | | | | |
| BCMA_EBB- | SYAMS | 1233 | AISGSGGSTYYADSVKG | 1273 | VGYDSSGYYRDYYGM | 1313 |
| C1981-C3 | | | | | DV | |
| BCMA_EBB- | SYAMS | 1234 | AISGSGGSTYYADSVKG | 1274 | MGWSSGYLGAFDI | 1314 |
| C1978-G4 | | | | | | |
| A7D12.2 | NFGMN | 1235 | WINTYTGESYFADDFKG | 1275 | GEIYYGYDGGFAY | 1315 |
| C11D5.3 | DYSIN | 1236 | WINTETREPAYAYDFRG | 1276 | DYSYAMDY | 1316 |
| C12A3.2 | HYSMN | 1237 | RINTESGVPIYADDFKG | 1277 | DYLYSLDF | 1317 |
| C13F12.1 | HYSMN | 1238 | RINTETGEPLYADDFKG | 1278 | DYLYSCDY | 1318 |

TABLE 13
Light Chain Variable Domain CDRs according to the Kabat
numbering scheme (Kabat et al. (1991), “Sequences of
Proteins of Immunological Interest,” 5th Ed. Public
Health Service, National Institutes of Health, Bethesda, MD)

| Candidate | LCDR1 | ID | LCDR2 | ID | LCDR3 | ID |
|---|---|---|---|---|---|---|
| 139109 | RASQSISSYLN | 1319 | AASSLQS | 1359 | QQSYSTPYT | 1399 |
| 139103 | RASQSISSSFLA | 1320 | GASRRAT | 1360 | QQYHSSPSWT | 1400 |
| 139105 | RSSQSLLHSNGYNYLD | 1321 | LGSNRAS | 1361 | MQALQTPYT | 1401 |
| 139111 | KSSQSLLRNDGKTPLY | 1322 | EVSNRFS | 1362 | MQNIQFPS | 1402 |
| 139100 | RSSQSLLHSNGYNYLN | 1323 | LGSKRAS | 1363 | MQALQTPYT | 1403 |
| 139101 | RASQSISSYLN | 1324 | GASTLAS | 1364 | QQSYKRAS | 1404 |
| 139102 | RSSQSLLYSNGYNYVD | 1325 | LGSNRAS | 1365 | MQGRQFPYS | 1405 |
| 139104 | RASQSVSSNLA | 1326 | GASTRAS | 1366 | QQYGSSLT | 1406 |
| 139106 | RASQSVSSKLA | 1327 | GASIRAT | 1367 | QQYGSSSWT | 1407 |
| 139107 | RASQSVGSTNLA | 1328 | DASNRAT | 1368 | QQYGSSPPWT | 1408 |
| 139108 | RASQSISSYLN | 1329 | AASSLQS | 1369 | QQSYTLA | 1409 |
| 139110 | KSSESLVHNSGKTYLN | 1330 | EVSNRDS | 1370 | MQGTHWPGT | 1410 |
| 139112 | QASEDINKFLN | 1331 | DASTLQT | 1371 | QQYESLPLT | 1411 |
| 139113 | RASQSVGSNLA | 1332 | GASTRAT | 1372 | QQYNDWLPVT | 1412 |
| 139114 | RASQSIGSSSLA | 1333 | GASSRAS | 1373 | QQYAGSPPFT | 1413 |
| 149362 | KASQDIDDAMN | 1334 | SATSPVP | 1374 | LQHDNFPLT | 1414 |
| 149363 | RASQDIYNNLA | 1335 | AANKSQS | 1375 | QHYYRFPYS | 1415 |
| 149364 | RSSQSLLHSNGYNYLD | 1336 | LGSNRAS | 1376 | MQALQTPYT | 1416 |
| 149365 | GGNNIGTKSVH | 1337 | DDSVRPS | 1377 | QVWDSDSEHVV | 1417 |
| 149366 | SGDGLSKKYVS | 1338 | RDKERPS | 1378 | QAWDDTTVV | 1418 |
| 149367 | RASQGIRNWLA | 1339 | AASNLQS | 1379 | QKYNSAPFT | 1419 |
| 149368 | GGNNIGSKSVH | 1340 | GKNNRPS | 1380 | SSRDSSGDHLRV | 1420 |
| 149369 | QGDSLGNYYAT | 1341 | GTNNRPS | 1381 | NSRDSSGHHLL | 1421 |
| BCMA_EBB- | RASQSVSSAYLA | 1342 | GASTRAT | 1382 | QHYGSSFNGSSLFT | 1422 |
| C1978-A4 | | | | | | |
| BCMA_EBB- | RASQSVSNSLA | 1343 | DASSRAT | 1383 | QQFGTSSGLT | 1423 |
| C1978-G1 | | | | | | |
| BCMA_EBB- | RASQSVSSSFLA | 1344 | GASSRAT | 1384 | QQYHSSPSWT | 1424 |
| C1979-C1 | | | | | | |
| BCMA_EBB- | RASQSVSTTFLA | 1345 | GSSNRAT | 1385 | QQYHSSPSWT | 1425 |
| C1978-C7 | | | | | | |
| BCMA_EBB- | RASQSISSYLN | 1346 | AASSLQS | 1386 | QQSYSTPYS | 1426 |
| C1978-D10 | | | | | | |
| BCMA_EBB- | RATQSIGSSFLA | 1347 | GASQRAT | 1387 | QHYESSPSWT | 1427 |
| C1979-C12 | | | | | | |
| BCMA_EBB- | RASQSVSSSYLA | 1348 | GASSRAT | 1388 | QQYGSPPRFT | 1428 |
| C1980-G4 | | | | | | |
| BCMA_EBB- | RASQSVSSSYLA | 1349 | GASSRAT | 1389 | QHYGSSPSWT | 1429 |
| C1980-D2 | | | | | | |
| BCMA_EBB- | RASQRVASNYLA | 1350 | GASSRAT | 1390 | QHYDSSPSWT | 1430 |
| C1978-A10 | | | | | | |
| BCMA_EBB- | RASQSLSSNFLA | 1351 | GASNWAT | 1391 | QYYGTSPMYT | 1431 |
| C1978-D4 | | | | | | |
| BCMA_EBB- | RSSQSLLHSNGYNYLD | 1352 | LGSNRAS | 1392 | MQALQTPLT | 1432 |
| C1980-A2 | | | | | | |
| BCMA_EBB- | RASQSVSSSYLA | 1353 | GTSSRAT | 1393 | QHYGNSPPKFT | 1433 |
| C1981-C3 | | | | | | |
| BCMA_EBB- | RASQSVASSFLA | 1354 | GASGRAT | 1394 | QHYGGSPRLT | 1434 |
| C1978-G4 | | | | | | |
| A7D12.2 | RASQDVNTAVS | 1355 | SASYRYT | 1395 | QQHYSTPWT | 1435 |
| C11D5.3 | RASESVSVIGAHLIH | 1356 | LASNLET | 1396 | LQSRIFPRT | 1436 |
| C12A3.2 | RASESVTILGSHLIY | 1357 | LASNVQT | 1397 | LQSRTIPRT | 1437 |
| C13F12.1 | RASESVTILGSHLIY | 1358 | LASNVQT | 1398 | LQSRTIPRT | 1438 |

TABLE 14
Heavy Chain Variable Domain CDRs according to
the Chothia numbering scheme (Al-Lazikani
et al., (1997) JMB 273,927-948)

| Candidate | HCDR1 | ID | HCDR2 | ID | HCDR3 | ID |
|---|---|---|---|---|---|---|
| 139109 | GFALSNH | 1439 | VYSGS | 1479 | HGGESDV | 1519 |
| 139103 | GFTFSNY | 1440 | SRSGEN | 1480 | SPAHYYGGMDV | 1520 |
| 139105 | GFTFDDY | 1441 | SWNSGS | 1481 | HSFLAY | 1521 |
| 139111 | GFALSNH | 1442 | VYSGS | 1482 | HGGESDV | 1522 |
| 139100 | GYIFDNF | 1443 | NPKNNN | 1483 | GPYYYQSYMDV | 1523 |
| 139101 | GFTFSSD | 1444 | SGSGGT | 1484 | LDSSGYYYARGPRY | 1524 |
| 139102 | GYTFSNY | 1445 | SAYNGN | 1485 | GPYYYYMDV | 1525 |
| 139104 | GFALSNH | 1446 | VYSGS | 1486 | HGGESDV | 1526 |
| 139106 | GFALSNH | 1447 | VYSGS | 1487 | HGGESDV | 1527 |
| 139107 | GFALSNH | 1448 | VYSGS | 1488 | HGGESDV | 1528 |
| 139108 | GFTFSDY | 1449 | SSSGST | 1489 | ESGDGMDV | 1529 |
| 139110 | GFTFSDY | 1450 | SSSGNT | 1490 | STMVREDY | 1530 |
| 139112 | GFALSNH | 1451 | VYSGS | 1491 | HGGESDV | 1531 |
| 139113 | GFALSNH | 1452 | VYSGS | 1492 | HGGESDV | 1532 |
| 139114 | GFALSNH | 1453 | VYSGS | 1493 | HGGESDV | 1533 |
| 149362 | GGSISSSYY | 1454 | YYSGS | 1494 | HWQEWPDAFDI | 1534 |
| 149363 | GFSLRTSGM | 1455 | DWDED | 1495 | SGAGGTSATAFDI | 1535 |
| 149364 | GFTFSSY | 1456 | SSSSSY | 1496 | TIAAVYAFDI | 1536 |
| 149365 | GFTFSDY | 1457 | SSSGST | 1497 | DLRGAFDI | 1537 |
| 149366 | GYTVTSH | 1458 | NPSGGV | 1498 | EGSGSGWYFDF | 1538 |
| 149367 | GGSISSGGY | 1459 | YYSGS | 1499 | AGIAARLRGAFDI | 1539 |
| 149368 | GGTFSSY | 1460 | IPIFGT | 1500 | RGGYQLLRWDVGLLRSAFDI | 1540 |
| 149369 | GDSVSSNSA | 1461 | YYRSKWY | 1501 | SSPEGLFLYWFDP | 1541 |
| BCMA_EBB- | GFTFSSY | 1462 | SGSGGS | 1502 | VEGSGSLDY | 1542 |
| C1978-A4 | | | | | | |
| BCMA_EBB- | GITFSRY | 1463 | SDSGVS | 1503 | RAGSEASDI | 1543 |
| C1978-G1 | | | | | | |
| BCMA_EBB- | GFTFSSY | 1464 | SGSGGS | 1504 | ATYKRELRYYYGMDV | 1544 |
| C1979-C1 | | | | | | |
| BCMA_EBB- | GFTFSSY | 1465 | SGSGGS | 1505 | ATYKRELRYYYGMDV | 1545 |
| C1978-C7 | | | | | | |
| BCMA_EBB- | GFTFDDY | 1466 | SWNSGS | 1506 | VGKAVPDV | 1546 |
| C1978-D10 | | | | | | |
| BCMA_EBB- | GFTFDDY | 1467 | NWKGNS | 1507 | HQGVAYYNYAMDV | 1547 |
| C1979-C12 | | | | | | |
| BCMA_EBB- | GFTFSSY | 1468 | SGSGGS | 1508 | VVRDGMDV | 1548 |
| C1980-G4 | | | | | | |
| BCMA_EBB- | GFTFSSY | 1469 | SGSGGS | 1509 | IPQTGTFDY | 1549 |
| C1980-D2 | | | | | | |
| BCMA_EBB- | GFTFSSY | 1470 | SGSGGS | 1510 | ANYKRELRYYYGMDV | 1550 |
| C1978-A10 | | | | | | |
| BCMA_EBB- | GFSFSSY | 1471 | SGSGGS | 1511 | ALVGATGAFDI | 1551 |
| C1978-D4 | | | | | | |
| BCMA_EBB- | GFTFSSY | 1472 | SGSGGS | 1512 | WFGEGFDP | 1552 |
| C1980-A2 | | | | | | |
| BCMA_EBB- | GFTFSSY | 1473 | SGSGGS | 1513 | VGYDSSGYYRDYYGMDV | 1553 |
| C1981-C3 | | | | | | |
| BCMA_EBB- | GFTFSSY | 1474 | SGSGGS | 1514 | MGWSSGYLGAFDI | 1554 |
| C1978-G4 | | | | | | |
| A7D12.2 | GYTFTNF | 1475 | NTYTGE | 1515 | GEIYYGYDGGFAY | 1555 |
| C11D5.3 | GYTFTDY | 1476 | NTETRE | 1516 | DYSYAMDY | 1556 |
| C12A3.2 | GYTFRHY | 1477 | NTESGV | 1517 | DYLYSLDF | 1557 |
| C13F12.1 | GYTFTHY | 1478 | NTETGE | 1518 | DYLYSCDY | 1558 |

TABLE 15
Light Chain Variable Domain CDRs according to
the Chothia numbering scheme
(Al-Lazikani et al., (1997) JMB 273,927-948)

| Candidate | LCDR1 | ID | LCDR2 | ID | LCDR3 | ID |
|---|---|---|---|---|---|---|
| 139109 | SQSISSY | 1559 | AAS | 1599 | SYSTPY | 1639 |
| 139103 | SQSISSSF | 1560 | GAS | 1600 | YHSSPSW | 1640 |
| 139105 | SQSLLHSNGYNY | 1561 | LGS | 1601 | ALQTPY | 1641 |
| 139111 | SQSLLRNDGKTP | 1562 | EVS | 1602 | NIQFP | 1642 |
| 139100 | SQSLLHSNGYNY | 1563 | LGS | 1603 | ALQTPY | 1643 |
| 139101 | SQSISSY | 1564 | GAS | 1604 | SYKRA | 1644 |
| 139102 | SQSLLYSNGYNY | 1565 | LGS | 1605 | GRQFPY | 1645 |
| 139104 | SQSVSSN | 1566 | GAS | 1606 | YGSSL | 1646 |
| 139106 | SQSVSSK | 1567 | GAS | 1607 | YGSSSW | 1647 |
| 139107 | SQSVGSTN | 1568 | DAS | 1608 | YGSSPPW | 1648 |
| 139108 | SQSISSY | 1569 | AAS | 1609 | SYTL | 1649 |
| 139110 | SESLVHNSGKTY | 1570 | EVS | 1610 | GTHWPG | 1650 |
| 139112 | SEDINKF | 1571 | DAS | 1611 | YESLPL | 1651 |
| 139113 | SQSVGSN | 1572 | GAS | 1612 | YNDWLPV | 1652 |
| 139114 | SQSIGSSS | 1573 | GAS | 1613 | YAGSPPF | 1653 |
| 149362 | SQDIDDA | 1574 | SAT | 1614 | HDNFPL | 1654 |
| 149363 | SQDIYNN | 1575 | AAN | 1615 | YYRFPY | 1655 |
| 149364 | SQSLLHSNGYNY | 1576 | LGS | 1616 | ALQTPY | 1656 |
| 149365 | NNIGTKS | 1577 | DDS | 1617 | WDSDSEHV | 1657 |
| 149366 | DGLSKKY | 1578 | RDK | 1618 | WDDTTV | 1658 |
| 149367 | SQGIRNW | 1579 | AAS | 1619 | YNSAPF | 1659 |
| 149368 | NNIGSKS | 1580 | GKN | 1620 | RDSSGDHLR | 1660 |
| 149369 | DSLGNYY | 1581 | GTN | 1621 | RDSSGHHL | 1661 |
| BCMA_EBB- | SQSVSSAY | 1582 | GAS | 1622 | YGSSFNGSSLF | 1662 |
| C1978-A4 | | | | | | |
| BCMA_EBB- | SQSVSNS | 1583 | DAS | 1623 | FGTSSGL | 1663 |
| C1978-G1 | | | | | | |
| BCMA_EBB- | SQSVSSSF | 1584 | GAS | 1624 | YHSSPSW | 1664 |
| C1979-C1 | | | | | | |
| BCMA_EBB- | SQSVSTTF | 1585 | GSS | 1625 | YHSSPSW | 1665 |
| C1978-C7 | | | | | | |
| BCMA_EBB- | SQSISSY | 1586 | AAS | 1626 | SYSTPY | 1666 |
| C1978-D10 | | | | | | |
| BCMA_EBB- | TQSIGSSF | 1587 | GAS | 1627 | YESSPSW | 1667 |
| C1979-C12 | | | | | | |
| BCMA_EBB- | SQSVSSSY | 1588 | GAS | 1628 | YGSPPRF | 1668 |
| C1980-G4 | | | | | | |
| BCMA_EBB- | SQSVSSSY | 1589 | GAS | 1629 | YGSSPSW | 1669 |
| C1980-D2 | | | | | | |
| BCMA_EBB- | SQRVASNY | 1590 | GAS | 1630 | YDSSPSW | 1670 |
| C1978-A10 | | | | | | |
| BCMA_EBB- | SQSLSSNF | 1591 | GAS | 1631 | YGTSPMY | 1671 |
| C1978-D4 | | | | | | |
| BCMA_EBB- | SQSLLHSNGYNY | 1592 | LGS | 1632 | ALQTPL | 1672 |
| C1980-A2 | | | | | | |
| BCMA_EBB- | SQSVSSSY | 1593 | GTS | 1633 | YGNSPPKF | 1673 |
| C1981-C3 | | | | | | |
| BCMA_EBB- | SQSVASSF | 1594 | GAS | 1634 | YGGSPRL | 1674 |
| C1978-G4 | | | | | | |
| A7D12.2 | SQDVNTA | 1595 | SAS | 1635 | HYSTPW | 1675 |
| C11D5.3 | SESVSVIGAHL | 1596 | LAS | 1636 | SRIFPR | 1676 |
| C12A3.2 | SESVTILGSHL | 1597 | LAS | 1637 | SRTIPR | 1677 |
| C13F12.1 | SESVTILGSHL | 1598 | LAS | 1638 | SRTIPR | 1678 |

TABLE 16
Heavy Chain Variable Domain CDRs according to a combination of
the Kabat numbering scheme (Kabat et al. (1991), “Sequences of
Proteins of Immunological Interest,” 5th Ed. Public Health Service,
National Institutes of Health, Bethesda, MD) and the Chothia
numbering scheme (Al-Lazikani et al., (1997) JMB 273,927-948).

| Candidate | HCDR1 | ID | HCDR2 | ID | HCDR3 | ID |
|---|---|---|---|---|---|---|
| 139109 | GFALSNHGMS | 1679 | GIVYSGSTYYAASVKG | 1719 | HGGESDV | 1759 |
| 139103 | GFTFSNYAMS | 1680 | GISRSGENTYYADSVKG | 1720 | SPAHYYGGMDV | 1760 |
| 139105 | GFTFDDYAMH | 1681 | GISWNSGSIGYADSVKG | 1721 | HSFLAY | 1761 |
| 139111 | GFALSNHGMS | 1682 | GIVYSGSTYYAASVKG | 1722 | HGGESDV | 1762 |
| 139100 | GYIFDNFGIN | 1683 | WINPKNNNTNYAQKFQG | 1723 | GPYYYQSYMDV | 1763 |
| 139101 | GFTFSSDAMT | 1684 | VISGSGGTTYYADSVKG | 1724 | LDSSGYYYARGPRY | 1764 |
| 139102 | GYTFSNYGIT | 1685 | WISAYNGNTNYAQKFQG | 1725 | GPYYYYMDV | 1765 |
| 139104 | GFALSNHGMS | 1686 | GIVYSGSTYYAASVKG | 1726 | HGGESDV | 1766 |
| 139106 | GFALSNHGMS | 1687 | GIVYSGSTYYAASVKG | 1727 | HGGESDV | 1767 |
| 139107 | GFALSNHGMS | 1688 | GIVYSGSTYYAASVKG | 1728 | HGGESDV | 1768 |
| 139108 | GFTFSDYYMS | 1689 | YISSSGSTIYYADSVKG | 1729 | ESGDGMDV | 1769 |
| 139110 | GFTFSDYYMS | 1690 | YISSSGNTIYYADSVKG | 1730 | STMVREDY | 1770 |
| 139112 | GFALSNHGMS | 1691 | GIVYSGSTYYAASVKG | 1731 | HGGESDV | 1771 |
| 139113 | GFALSNHGMS | 1692 | GIVYSGSTYYAASVKG | 1732 | HGGESDV | 1772 |
| 139114 | GFALSNHGMS | 1693 | GIVYSGSTYYAASVKG | 1733 | HGGESDV | 1773 |
| 149362 | GGSISSSYYYWG | 1694 | SIYYSGSAYYNPSLKS | 1734 | HWQEWPDAFDI | 1774 |
| 149363 | GFSLRTSGMCVS | 1695 | RIDWDEDKFYSTSLKT | 1735 | SGAGGTSATAFDI | 1775 |
| 149364 | GFTFSSYSMN | 1696 | SISSSSSYIYYADSVKG | 1736 | TIAAVYAFDI | 1776 |
| 149365 | GFTFSDYYMS | 1697 | YISSSGSTIYYADSVKG | 1737 | DLRGAFDI | 1777 |
| 149366 | GYTVTSHYIH | 1698 | MINPSGGVTAYSQTLQG | 1738 | EGSGSGWYFDF | 1778 |
| 149367 | GGSISSGGYYWS | 1699 | YIYYSGSTYYNPSLKS | 1739 | AGIAARLRGAFDI | 1779 |
| 149368 | GGTFSSYAIS | 1700 | GIIPIFGTANYAQKFQG | 1740 | RGGYQLLRWDVGLLR | 1780 |
| | | | | | SAFDI | |
| 149369 | GDSVSSNSAAWN | 1701 | RTYYRSKWYSFYAISL | 1741 | SSPEGLFLYWFDP | 1781 |
| | | | KS | | | |
| BCMA_EBB- | GFTFSSYAMS | 1702 | AISGSGGSTYYADSVKG | 1742 | VEGSGSLDY | 1782 |
| C1978-A4 | | | | | | |
| BCMA_EBB- | GITFSRYPMS | 1703 | GISDSGVSTYYADSAKG | 1743 | RAGSEASDI | 1783 |
| C1978-G1 | | | | | | |
| BCMA_EBB- | GFTFSSYAMS | 1704 | AISGSGGSTYYADSVKG | 1744 | ATYKRELRYYYGMDV | 1784 |
| C1979-C1 | | | | | | |
| BCMA_EBB- | GFTFSSYAMS | 1705 | AISGSGGSTYYADSVKG | 1745 | ATYKRELRYYYGMDV | 1785 |
| C1978-C7 | | | | | | |
| BCMA_EBB- | GFTFDDYAMH | 1706 | GISWNSGSIGYADSV | 1746 | VGKAVPDV | 1786 |
| C1978-D10 | | | KG | | | |
| BCMA_EBB- | GFTFDDYAMH | 1707 | SINWKGNSLAYGDSV | 1747 | HQGVAYYNYAMDV | 1787 |
| C1979-C12 | | | KG | | | |
| BCMA_EBB- | GFTFSSYAMS | 1708 | AISGSGGSTYYADSVKG | 1748 | VVRDGMDV | 1788 |
| C1980-G4 | | | | | | |
| BCMA_EBB- | GFTFSSYAMS | 1709 | AISGSGGSTYYADSVKG | 1749 | IPQTGTFDY | 1789 |
| C1980-D2 | | | | | | |
| BCMA_EBB- | GFTFSSYAMS | 1710 | AISGSGGSTYYADSVKG | 1750 | ANYKRELRYYYGMDV | 1790 |
| C1978-A10 | | | | | | |
| BCMA_EBB- | GFSFSSYAMS | 1711 | AISGSGGSTYYADSVKG | 1751 | ALVGATGAFDI | 1791 |
| C1978-D4 | | | | | | |
| BCMA_EBB- | GFTFSSYAMS | 1712 | AISGSGGSTYYADSVKG | 1752 | WFGEGFDP | 1792 |
| C1980-A2 | | | | | | |
| BCMA_EBB- | GFTFSSYAMS | 1713 | AISGSGGSTYYADSVKG | 1753 | VGYDSSGYYRDYYGM | 1793 |
| C1981-C3 | | | | | DV | |
| BCMA_EBB- | GFTFSSYAMS | 1714 | AISGSGGSTYYADSVKG | 1754 | MGWSSGYLGAFDI | 1794 |
| C1978-G4 | | | | | | |
| A7D12.2 | GYTFTNFGMN | 1715 | WINTYTGESYFADDFKG | 1755 | GEIYYGYDGGFAY | 1795 |
| C11D5.3 | GYTFTDYSIN | 1716 | WINTETREPAYAYDFRG | 1756 | DYSYAMDY | 1796 |
| C12A3.2 | GYTFRHYSMN | 1717 | RINTESGVPIYADDFKG | 1757 | DYLYSLDF | 1797 |
| C13F12.1 | GYTFTHYSMN | 1718 | RINTETGEPLYADDFKG | 1758 | DYLYSCDY | 1798 |

TABLE 17
Light Chain Variable Domain CDRs according to a combination
of the Kabat numbering scheme (Kabat et al. (1991),
“Sequences of Proteins of Immunological Interest,” 5th
Ed. Public Health Service, National Institutes of Health,
Bethesda, MD) and the Chothia numbering scheme
(Al-Lazikani et al., (1997) JMB 273,927-948).

| Candidate | LCDR1 | ID | LCDR2 | ID | LCDR3 | ID |
|---|---|---|---|---|---|---|
| 139109 | RASQSISSYLN | 1799 | AASSLQS | 1839 | QQSYSTPYT | 1879 |
| 139103 | RASQSISSSFLA | 1800 | GASRRAT | 1840 | QQYHSSPSWT | 1880 |
| 139105 | RSSQSLLHSNGYNYLD | 1801 | LGSNRAS | 1841 | MQALQTPYT | 1881 |
| 139111 | KSSQSLLRNDGKTPLY | 1802 | EVSNRFS | 1842 | MQNIQFPS | 1882 |
| 139100 | RSSQSLLHSNGYNYLN | 1803 | LGSKRAS | 1843 | MQALQTPYT | 1883 |
| 139101 | RASQSISSYLN | 1804 | GASTLAS | 1844 | QQSYKRAS | 1884 |
| 139102 | RSSQSLLYSNGYNYVD | 1805 | LGSNRAS | 1845 | MQGRQFPYS | 1885 |
| 139104 | RASQSVSSNLA | 1806 | GASTRAS | 1846 | QQYGSSLT | 1886 |
| 139106 | RASQSVSSKLA | 1807 | GASIRAT | 1847 | QQYGSSSWT | 1887 |
| 139107 | RASQSVGSTNLA | 1808 | DASNRAT | 1848 | QQYGSSPPWT | 1888 |
| 139108 | RASQSISSYLN | 1809 | AASSLQS | 1849 | QQSYTLA | 1889 |
| 139110 | KSSESLVHNSGKTYLN | 1810 | EVSNRDS | 1850 | MQGTHWPGT | 1890 |
| 139112 | QASEDINKFLN | 1811 | DASTLQT | 1851 | QQYESLPLT | 1891 |
| 139113 | RASQSVGSNLA | 1812 | GASTRAT | 1852 | QQYNDWLPVT | 1892 |
| 139114 | RASQSIGSSSLA | 1813 | GASSRAS | 1853 | QQYAGSPPFT | 1893 |
| 149362 | KASQDIDDAMN | 1814 | SATSPVP | 1854 | LQHDNFPLT | 1894 |
| 149363 | RASQDIYNNLA | 1815 | AANKSQS | 1855 | QHYYRFPYS | 1895 |
| 149364 | RSSQSLLHSNGYNYLD | 1816 | LGSNRAS | 1856 | MQALQTPYT | 1896 |
| 149365 | GGNNIGTKSVH | 1817 | DDSVRPS | 1857 | QVWDSDSEHVV | 1897 |
| 149366 | SGDGLSKKYVS | 1818 | RDKERPS | 1858 | QAWDDTTVV | 1898 |
| 149367 | RASQGIRNWLA | 1819 | AASNLQS | 1859 | QKYNSAPFT | 1899 |
| 149368 | GGNNIGSKSVH | 1820 | GKNNRPS | 1860 | SSRDSSGDHLRV | 1900 |
| 149369 | QGDSLGNYYAT | 1821 | GTNNRPS | 1861 | NSRDSSGHHLL | 1901 |
| BCMA_EBB- | RASQSVSSAYLA | 1822 | GASTRAT | 1862 | QHYGSSFNGSSLFT | 1902 |
| C1978-A4 | | | | | | |
| BCMA_EBB- | RASQSVSNSLA | 1823 | DASSRAT | 1863 | QQFGTSSGLT | 1903 |
| C1978-G1 | | | | | | |
| BCMA_EBB- | RASQSVSSSFLA | 1824 | GASSRAT | 1864 | QQYHSSPSWT | 1904 |
| C1979-C1 | | | | | | |
| BCMA_EBB- | RASQSVSTTFLA | 1825 | GSSNRAT | 1865 | QQYHSSPSWT | 1905 |
| C1978-C7 | | | | | | |
| BCMA_EBB- | RASQSISSYLN | 1826 | AASSLQS | 1866 | QQSYSTPYS | 1906 |
| C1978-D10 | | | | | | |
| BCMA_EBB- | RATQSIGSSFLA | 1827 | GASQRAT | 1867 | QHYESSPSWT | 1907 |
| C1979-C12 | | | | | | |
| BCMA_EBB- | RASQSVSSSYLA | 1828 | GASSRAT | 1868 | QQYGSPPRFT | 1908 |
| C1980-G4 | | | | | | |
| BCMA_EBB- | RASQSVSSSYLA | 1829 | GASSRAT | 1869 | QHYGSSPSWT | 1909 |
| C1980-D2 | | | | | | |
| BCMA_EBB- | RASQRVASNYLA | 1830 | GASSRAT | 1870 | QHYDSSPSWT | 1910 |
| C1978-A10 | | | | | | |
| BCMA_EBB- | RASQSLSSNFLA | 1831 | GASNWAT | 1871 | QYYGTSPMYT | 1911 |
| C1978-D4 | | | | | | |
| BCMA_EBB- | RSSQSLLHSNGYNYLD | 1832 | LGSNRAS | 1872 | MQALQTPLT | 1912 |
| C1980-A2 | | | | | | |
| BCMA_EBB- | RASQSVSSSYLA | 1833 | GTSSRAT | 1873 | QHYGNSPPKFT | 1913 |
| C1981-C3 | | | | | | |
| BCMA_EBB- | RASQSVASSFLA | 1834 | GASGRAT | 1874 | QHYGGSPRLT | 1914 |
| C1978-G4 | | | | | | |
| A7D12.2 | RASQDVNTAVS | 1835 | SASYRYT | 1875 | QQHYSTPWT | 1915 |
| C11D5.3 | RASESVSVIGAHLIH | 1836 | LASNLET | 1876 | LQSRIFPRT | 1916 |
| C12A3.2 | RASESVTILGSHLIY | 1837 | LASNVQT | 1877 | LQSRTIPRT | 1917 |
| C13F12.1 | RASESVTILGSHLIY | 1838 | LASNVQT | 1878 | LQSRTIPRT | 1918 |

[0917] In certain embodiments, the CAR molecule described herein (e.g., the CAR nucleic acid or the CAR polypeptide) or a BCMA binding domain includes:
[0918] (1) one, two, or three light chain (LC) CDRs chosen from one of the following:
   [0919] (i) a LC CDR1 of SEQ ID NO: 1320, LC CDR2 of SEQ ID NO: 1360 and LC CDR3 of SEQ ID NO: 1400 of BCMA-4 CAR (139103);
   [0920] (ii) a LC CDR1 of SEQ ID NO: 1319. LC CDR2 of SEQ ID NO: 1359 and LC CDR3 of SEQ ID NO: 1399 of BCMA-10 CAR (139109);
   [0921] (iii) a LC CDR1 of SEQ ID NO: 1331, LC CDR2 of SEQ ID NO: 1371 and LC CDR3 of SEQ ID NO: 1411 of BCMA-13 CAR (139112); or
   [0922] (iv) a LC CDR1 of SEQ ID NO: 1333, LC CDR2 of SEQ ID NO: 1373 and LC CDR3 of SEQ ID NO: 1413 of BCMA-15 CAR (139114), and/or
[0923] (2) one, two, or three heavy chain (HC) CDRs from one of the following:
   [0924] (i) a HC CDR1 of SEQ ID NO: 1200, HC CDR2 of SEQ ID NO: 1240 and HC CDR3 of SEQ ID NO: 1280 of BCMA-4 CAR (139103);
   [0925] (ii) a HC CDR1 of SEQ ID NO: 1199, HC CDR2 of SEQ ID NO: 1239 and HC CDR3 of SEQ ID NO: 1279 of BCMA-10 CAR (139109);
   [0926] (iii) a HC CDR1 of SEQ ID NO: 1121, HC CDR2 of SEQ ID NO: 1251 and HC CDR3 of SEQ ID NO: 1291 of BCMA-13 CAR (139112); or
   [0927] (iv) a HC CDR1 of SEQ ID NO: 1213, HC CDR2 of SEQ ID NO: 1253 and HC CDR3 of SEQ ID NO: 1293 of BCMA-15 (139114).

[0928] In certain embodiments, the CAR molecule described herein (e.g., the CAR nucleic acid or the CAR polypeptide) includes:
[0929] (1) one, two, or three light chain (LC) CDRs chosen from one of the following:
   [0930] (i) a LC CDR1 of SEQ ID NO: 1560, LC CDR2 of SEQ ID NO: 1600 and LC CDR3 of SEQ ID NO: 1640 of BCMA-4 CAR (139103);
   [0931] (ii) a LC CDR1 of SEQ ID NO: 1559, LC CDR2 of SEQ ID NO: 1599 and LC CDR3 of SEQ ID NO: 1639 of BCMA-10 CAR (139109);
   [0932] (iii) a LC CDR1 of SEQ ID NO: 1571, LC CDR2 of SEQ ID NO: 1611 and LC CDR3 of SEQ ID NO: 1651 of BCMA-13 CAR (139112); or
   [0933] (iv) a LC CDR1 of SEQ ID NO: 1573, LC CDR2 of SEQ ID NO: 1613 and LC CDR3 of SEQ ID NO: 1653 of BCMA-15 CAR (139114); and/or
[0934] (2) one, two, or three heavy chain (HC) CDRs chosen from one of the following:
   [0935] (i) a HC CDR1 of SEQ ID NO: 1440, HC CDR2 of SEQ ID NO: 1480 and HC CDR3 of SEQ ID NO: 1520 of BCMA-4 CAR (139103);
   [0936] (ii) a HC CDR1 of SEQ ID NO: 1439, HC CDR2 of SEQ ID NO: 1479 and HC CDR3 of SEQ ID NO: 1519 of BCMA-10 CAR (139109);
   [0937] (iii) a HC CDR1 of SEQ ID NO: 1451, HC CDR2 of SEQ ID NO: 1491 and HC CDR3 of SEQ ID NO: 1531 of BCMA-13 CAR (139112); or
   [0938] (iv) a HC CDR1 of SEQ ID NO: 1453, HC CDR2 of SEQ ID NO: 1493 and HC CDR3 of SEQ ID NO: 1533 of BCMA-15 CAR (139114).

[0939] In certain embodiments, the CAR molecule described herein (e.g., the CAR nucleic acid or the CAR polypeptide) includes:
[0940] (1) one, two, or three light chain (LC) CDRs chosen from one of the following:
   [0941] (i) a LC CDR1 of SEQ ID NO: 1800 LC CDR2 of SEQ ID NO: 1840 and LC CDR3 of SEQ ID NO: 1880 of BCMA-4 CAR (139103);
   [0942] (ii) a LC CDR1 of SEQ ID NO: 1799, LC CDR2 of SEQ ID NO: 1839 and LC CDR3 of SEQ ID NO: 1879 of BCMA-10 CAR (139109);
   [0943] (iii) a LC CDR1 of SEQ ID NO: 1811, LC CDR2 of SEQ ID NO: 1851 and LC CDR3 of SEQ ID NO: 1891 of BCMA-13 CAR (139112); or
   [0944] (iv) a LC CDR1 of SEQ ID NO: 1813, LC CDR2 of SEQ ID NO: 1853 and LC CDR3 of SEQ ID NO: 1893 of BCMA-15 CAR (139114); and/or
[0945] (2) one, two, or three heavy chain (HC) CDRs chosen from one of the following:
   [0946] (i) a HC CDR1 of SEQ ID NO: 1680, HC CDR2 of SEQ ID NO: 1720 and HC CDR3 of SEQ ID NO: 1760 of BCMA-4 CAR (139103);
   [0947] (ii) a HC CDR1 of SEQ ID NO: 1679, HC CDR2 of SEQ ID NO: 1719 and HC CDR3 of SEQ ID NO: 1759 of BCMA-10 CAR (139109);
   [0948] (iii) a HC CDR1 of SEQ ID NO: 1691, HC CDR2 of SEQ ID NO: 1731 and HC CDR3 of SEQ ID NO: 1771 of BCMA-13 CAR (139112);
   [0949] (iv) a HC CDR1 of SEQ ID NO: 1693, HC CDR2 of SEQ ID NO: 1733 and HC CDR3 of SEQ ID NO: 1773 of BCMA-15 CAR (139114).

### Exemplary Components of the CAR Molecules:

Leader (amino acid sequence)
(SEQ ID NO: 1919)
MALPVTALLLPLALLLHAARP
leader (nucleic acid sequence)
(SEQ ID NO: 1920)
ATGGCCCTGCCTGTGACAGCCCTGCTGCTGCCTCTGGCTCTGCTGCTGC
ATGCCGCTAGACCC
CD8 hinge (amino acid sequence)
(SEQ ID NO: 1921)
TTTPAPRPPTPAPTIASQPLSLRPEACRPAAGGAVHTRGLDFACD
CD8 hinge (nucleic acid sequence)
(SEQ ID NO: 1922)
ACCACGACGCCAGCGCCGCGACCACCAACACCGGCGCCCACCATCGCGT
CGCAGCCCCTGTCCCTGCGCCCAGAGGCGTGCCGGCCAGCGGCGGGGGG
CGCAGTGCACACGAGGGGGCTGGACTTCGCCTGTGAT
CD8 transmembrane (amino acid sequence)
(SEQ ID NO: 1923)
IYIWAPLAGTCGVLLLSLVITLYC
CD8 transmembrane (nucleic acid sequence)
(SEQ ID NO: 1924)
ATCTACATCTGGGCGCCCTTGGCCGGGACTTGTGGGGTCCTTCTCCTGT
CACTGGTTATCACCCTTTACTGC
4-1BB Intracellular domain (amino acid sequence)
(SEQ ID NO: 1925)
KRGRKKLLYIFKQPFMRPVQTTQEEDGCSCRFPEEEEGGCEL
4-1BB Intracellular domain (nucleic acid sequence)
(SEQ ID NO: 1926)
AAACGGGGCAGAAAGAAACTCCTGTATATATTCAAACAACCATTTATGA
GACCAGTACAAACTACTCAAGAGGAAGATGGCTGTAGCTGCCGATTTCC
AGAAGAAGAAGAAGGAGGATGTGAACTG
CD28 Intracellular domain (amino acid sequence)
(SEQ ID NO: 1927)
(SEQ ID NO: 1927)
RSKRSRLLHSDYMNMTPRRPGPTRKHYQPYAPPRDFAAYRS
CD28 Intracellular domain (nucleotide sequence)
(SEQ ID NO: 1928)
(SEQ ID NO: 1928)
AGGAGTAAGAGGAGCAGGCTCCTGCACAGTGACTACATGAACATGACTC
CCCGCCGCCCCGGGCCCACCCGCAAGCATTACCAGCCCTATGCCCCACC
ACGCGACTTCGCAGCCTATCGCTCC
ICOS Intracellular domain (amino acid sequence)
(SEQ ID NO: 1929)
(SEQ ID NO: 1929)
T K K K Y S S S V H D P N G E Y M F M R A V N T A
K K S R L T D V T L
ICOS Intracellular domain (nucleotide sequence)
(SEQ ID NO: 1930)
(SEQ ID NO: 1930)
ACAAAAAAGAAGTATTCATCCAGTGTGCACGACCCTAACGGTGAATACA
TGTTCATGAGAGCAGTGAACACAGCCAAAAAATCCAGACTCACAGATGT
GACCCTA
CD3 zeta domain (amino acid sequence)
(SEQ ID NO: 1931)
RVKFSRSADAPAYKQGQNQLYNELNLGRREEYDVLDKRRGRDPEMGGKP
RRKNPQEGLYNELQKDKMAEAYSEIGMKGERRRGKGHDGLYQGLSTATK
DTYDALHMQALPPR
CD3 zeta (nucleic acid sequence)
(SEQ ID NO: 1932)
AGAGTGAAGTTCAGCAGGAGCGCAGACGCCCCCGCGTACAAGCAGGGCC
AGAACCAGCTCTATAACGAGCTCAATCTAGGACGAAGAGAGGAGTACGA
TGTTTTGGACAAGAGACGTGGCCGGGACCCTGAGATGGGGGGAAAGCCG
AGAAGGAAGAACCCTCAGGAAGGCCTGTACAATGAACTGCAGAAAGATA
AGATGGCGGAGGCCTACAGTGAGATTGGGATGAAAGGCGAGCGCCGGAG
GGGCAAGGGGCACGATGGCCTTTACCAGGGTCTCAGTACAGCCACCAAG
GACACCTACGACGCCCTTCACATGCAGGCCCTGCCCCCTCGC
CD3 zeta domain (amino acid sequence; NCBI
Reference NM_000734.3)
(SEQ ID NO: 1933)
RVKFSRSADAPAYQQGQNQLYNELNLGRREEYDVLDKRRGRDPEMGGKP
RRKNPQEGLYNELQKDKMAEAYSEIGMKGERRRGKGHDGLYQGLSTATK
DTYDALHMQALPPR
CD3 zeta (nucleic acid sequence; NCBI Reference
Sequence NM_000734.3);
(SEQ ID NO: 1934)
AGAGTGAAGTTCAGCAGGAGCGCAGACGCCCCCGCGTACCAGCAGGGCC
AGAACCAGCTCTATAACGAGCTCAATCTAGGACGAAGAGAGGAGTACGA
TGTTTTGGACAAGAGACGTGGCCGGGACCCTGAGATGGGGGGAAAGCCG
AGAAGGAAGAACCCTCAGGAAGGCCTGTACAATGAACTGCAGAAAGATA
AGATGGCGGAGGCCTACAGTGAGATTGGGATGAAAGGCGAGCGCCGGAG
GGGCAAGGGGCACGATGGCCTTTACCAGGGTCTCAGTACAGCCACCAAG
GACACCTACGACGCCCTTCACATGCAGGCCCTGCCCCCTCGC
IgG4 Hinge (amino acid sequence)
(SEQ ID NO: 1935)
ESKYGPPCPPCPAPEFLGGPSVFLFPPKPKDTLMISRTPEVTCVVVDVS
QEDPEVQFNWYVDGVEVHNAKTKPREEQFNSTYRVVSVLTVLHQDWLNG
KEYKCKVSNKGLPSSIEKTISKAKGQPREPQVYTLPPSQEEMTKNQVSL
TCLVKGFYPSDIAVEWESNGQPENNYKTTPPVLDSDGSFFLYSRLTVDK
SRWQEGNVFSCSVMHEALHNHYTQKSLSLSLGKM
IgG4 Hinge (nucleotide sequence)
(SEQ ID NO: 1936)
GAGAGCAAGTACGGCCCTCCCTGCCCCCCTTGCCCTGCCCCCGAGTTCC
TGGGCGGACCCAGCGTGTTCCTGTTCCCCCCCAAGCCCAAGGACACCCT
GATGATCAGCCGGACCCCCGAGGTGACCTGTGTGGTGGTGGACGTGTCC
CAGGAGGACCCCGAGGTCCAGTTCAACTGGTACGTGGACGGCGTGGAGG
TGCACAACGCCAAGACCAAGCCCCGGGAGGAGCAGTTCAATAGCACCTA
CCGGGTGGTGTCCGTGCTGACCGTGCTGCACCAGGACTGGCTGAACGGC
AAGGAATACAAGTGTAAGGTGTCCAACAAGGGCCTGCCCAGCAGCATCG
AGAAAACCATCAGCAAGGCCAAGGGCCAGCCTCGGGAGCCCCAGGTGTA
CACCCTGCCCCCTAGCCAAGAGGAGATGACCAAGAACCAGGTGTCCCTG
ACCTGCCTGGTGAAGGGCTTCTACCCCAGCGACATCGCCGTGGAGTGGG
AGAGCAACGGCCAGCCCGAGAACAACTACAAGACCACCCCCCCTGTGCT
GGACAGCGACGGCAGCTTCTTCCTGTACAGCCGGCTGACCGTGGACAAG
AGCCGGTGGCAGGAGGGCAACGTCTTTAGCTGCTCCGTGATGCACGAGG
CCCTGCACAACCACTACACCCAGAAGAGCCTGAGCCTGTCCCTGGGCAA
GATG

[0950] In an embodiment, the CAR molecule comprises a mesothelin CAR described herein, e.g., a mesothelin CAR described in WO 2015/090230, incorporated herein by reference. In embodiments, the mesothelin CAR comprises an amino acid, or has a nucleotide sequence shown in WO 2015/090230 incorporated herein by reference, or a sequence substantially identical to any of the aforesaid sequences (e.g., at least 85%, 90%, 95% or more identical to any of the aforesaid mesothelin CAR sequences). In one embodiment, the CAR molecule comprises a mesothelin CAR, or an antigen binding domain according to Tables 2-3 of WO 2015/090230, incorporated herein by reference, or a sequence substantially identical thereto (e.g., at least 85%, 90%, 95% or more identical thereto). The amino acid and nucleotide sequences encoding the mesothelin CAR molecules and antigen binding domains (e.g., including one, two, three VH CDRs; and one, two, three VL CDRs according to Kabat or Chothia), are specified in WO 2015/090230.

[0951] In an embodiment, the CAR molecule comprises a CLL1 CAR described herein, e.g., a CLL1 CAR described in US2016/0051651A1, incorporated herein by reference. In embodiments, the CLL1 CAR comprises an amino acid, or has a nucleotide sequence shown in US2016/0051651A1, incorporated herein by reference, or a sequence substantially identical to any of the aforesaid sequences (e.g., at least 85%, 90%, 95% or more identical to any of the aforesaid CLL1 CAR sequences).

[0952] In other embodiments, the CLL1 CAR includes a CAR molecule, or an antigen binding domain according to Table 2 of WO2016/014535, incorporated herein by reference, or a sequence substantially identical to any of the aforesaid sequences (e.g., at least 85%, 90%, 95% or more identical to any of the aforesaid CLL1 CAR sequences). The amino acid and nucleotide sequences encoding the CLL-1 CAR molecules and antigen binding domains (e.g., including one, two, three VH CDRs; and one, two, three VL CDRs according to Kabat or Chothia), are specified in WO2016/014535.

[0953] In an embodiment, the CAR molecule comprises a CD33 CAR described herein, e.g., a CD33 CAR described in US2016/0096892A1, incorporated herein by reference. In embodiments, the CD33 CAR comprises an amino acid, or has a nucleotide sequence shown in US2016/0096892A1, incorporated herein by reference, or a sequence substantially identical to any of the aforesaid sequences (e.g., at least 85%, 90%, 95% or more identical to any of the aforesaid CD33 CAR sequences). In other embodiments, the CD33 CAR CAR or antigen binding domain thereof can include a CAR molecule (e.g., any of CAR33-1 to CAR-33-9), or an antigen binding domain according to Table 2 or 9 of WO2016/014576, incorporated herein by reference, or a sequence substantially identical to any of the aforesaid sequences (e.g., at least 85%, 90%, 95% or more identical to any of the aforesaid CD33 CAR sequences). The amino acid and nucleotide sequences encoding the CD33 CAR molecules and antigen binding domains (e.g., including one, two, three VH CDRs; and one, two, three VL CDRs according to Kabat or Chothia), are specified in WO2016/014576.

[0954] In embodiments, the CAR molecule comprises a CD123 CAR described herein, e.g., a CD123 CAR described in US2014/0322212A1 or US2016/0068601A1, both incorporated herein by reference. In embodiments, the CD123 CAR comprises an amino acid, or has a nucleotide sequence shown in US2014/0322212A1 or US2016/0068601A1, both incorporated herein by reference, or a sequence substantially identical to any of the aforesaid sequences (e.g., at least 85%, 90%, 95% or more identical to any of the aforesaid CD123 CAR sequences). In one embodiment, the CAR molecule comprises a CD123 CAR (e.g., any of the CAR1-CAR8), or an antigen binding domain according to Tables 1-2 of WO 2014/130635, incorporated herein by reference, or a sequence substantially identical thereto (e.g., at least 85%, 90%, 95% or more identical to any of the aforesaid CD123 CAR sequences). The amino acid and nucleotide sequences encoding the CD123 CAR molecules and antigen binding domains (e.g., including one, two, three VH CDRs; and one, two, three VL CDRs according to Kabat or Chothia), are specified in WO 2014/130635.

[0955] In other embodiments, the CAR molecule comprises a CD123 CAR comprises a CAR molecule (e.g., any of the CAR123-1 to CAR123-4 and hzCAR123-1 to hzCAR123-32), or an antigen binding domain according to Tables 2, 6, and 9 of WO2016/028896, incorporated herein by reference, or a sequence substantially identical thereto (e.g., at least 85%, 90%, 95% or more identical to any of the aforesaid CD123 CAR sequences). The amino acid and nucleotide sequences encoding the CD123 CAR molecules and antigen binding domains (e.g., including one, two, three VH CDRs; and one, two, three VL CDRs according to Kabat or Chothia), are specified in WO2016/028896.

[0956] In an embodiment, the CAR molecule comprises an EGFRvIII CAR molecule described herein, e.g., an EGFRvIII CAR described US2014/0322275A1, incorporated herein by reference. In embodiments, the EGFRvIII CAR comprises an amino acid, or has a nucleotide sequence shown in US2014/0322275A1, incorporated herein by reference, or a sequence substantially identical to any of the aforesaid sequences (e.g., at least 85%, 90%, 95% or more identical to any of the aforesaid EGFRvIII CAR sequences). In one embodiment, the CAR molecule comprises an EGFRvIII CAR, or an antigen binding domain according to Table 2 or SEQ ID NO: 11 of WO 2014/130657, incorporated herein by reference, or a sequence substantially identical thereto (e.g., at least 85%, 90%, 95% or more identical thereto). The amino acid and nucleotide sequences encoding the EGFRvIII CAR molecules and antigen binding domains (e.g., including one, two, three VH CDRs; and one, two, three VL CDRs according to Kabat or Chothia), are specified in WO 2014/130657.

[0957] In other embodiments, the CAR molecule comprises an a GFR ALPHA-4 CAR, e.g., can include a CAR molecule, or an antigen binding domain according to Table 2 of WO2016/025880, incorporated herein by reference, or a sequence substantially identical to any of the aforesaid sequences (e.g., at least 85%, 90%, 95% or more identical to any of the aforesaid GFR ALPHA-4 sequences). The amino acid and nucleotide sequences encoding the GFR ALPHA-4 CAR molecules and antigen binding domains (e.g., including one, two, three VH CDRs; and one, two, three VL CDRs according to Kabat or Chothia), are specified in WO2016/025880.

### Inhibitory Domains

[0958] In an embodiment, the vector comprises a nucleic acid sequence that encodes a CAR, e.g., a CAR described herein, and a nucleic acid sequence that encodes an inhibitory molecule comprising: an inhKIR cytoplasmic domain; a transmembrane domain, e.g., a KIR transmembrane domain; and an inhibitor cytoplasmic domain, e.g., an ITIM domain, e.g., an inhKIR ITIM domain. In an embodiment the inhibitory molecule is a naturally occurring inhKIR, or a sequence sharing at least 50, 60, 70, 80, 85, 90, 95, or 99% homology with, or that differs by no more than 1, 2, 3, 4, 5, 6, 7, 8, 9, 10, 15, or 20 residues from, a naturally occurring inhKIR.

[0959] In an embodiment, the nucleic acid sequence that encodes an inhibitory molecule comprises: a SLAM family cytoplasmic domain; a transmembrane domain, e.g., a SLAM family transmembrane domain; and an inhibitor cytoplasmic domain, e.g., a SLAM family domain, e.g., an SLAM family ITIM domain. In an embodiment the inhibitory molecule is a naturally occurring SLAM family member, or a sequence sharing at least 50, 60, 70, 80, 85, 90, 95, or 99% homology with, or that differs by no more than 1, 2, 3, 4, 5, 6, 7, 8, 9, 10, 15, or 20 residues from, a naturally occurring SLAM family member.

[0960] In one embodiment, the vector is an in vitro transcribed vector, e.g., a vector that transcribes RNA of a nucleic acid molecule described herein. In one embodiment, the nucleic acid sequence in the vector further comprises a poly(A) tail, e.g., a poly A tail. In one embodiment, the nucleic acid sequence in the vector further comprises a 3′UTR, e.g., a 3′ UTR described herein, e.g., comprising at least one repeat of a 3′UTR derived from human beta-globulin. In one embodiment, the nucleic acid sequence in the vector further comprises promoter, e.g., a T2A promoter.

### Promoters

[0961] In one embodiment, the vector further comprises a promoter. In some embodiments, the promoter is chosen from an EF-1 promoter, a CMV IE gene promoter, an EF-la promoter, an ubiquitin C promoter, or a phosphoglycerate kinase (PGK) promoter. In one embodiment, the promoter is an EF-1 promoter. In one embodiment, the EF-1 promoter comprises a sequence of SEQ ID NO: 1.

### Host Cells

[0962] As noted above, in some aspects the invention pertains to a cell, e.g., an immune effector cell, (e.g., a population of cells, e.g., a population of immune effector cells) comprising a nucleic acid molecule, a chimeric polypeptide molecule, or a vector as described herein.

[0963] In certain aspects of the present disclosure, immune effector cells, e.g., T cells, can be obtained from a unit of blood collected from a subject using any number of techniques known to the skilled artisan, such as Ficoll™ separation. In one preferred aspect, cells from the circulating blood of an individual are obtained by apheresis. The apheresis product typically contains lymphocytes, including T cells, monocytes, granulocytes, B cells, other nucleated white blood cells, red blood cells, and platelets. In one aspect, the cells collected by apheresis may be washed to remove the plasma fraction and, optionally, to place the cells in an appropriate buffer or media for subsequent processing steps. In one embodiment, the cells are washed with phosphate buffered saline (PBS). In an alternative embodiment, the wash solution lacks calcium and may lack magnesium or may lack many if not all divalent cations.

[0964] Initial activation steps in the absence of calcium can lead to magnified activation. As those of ordinary skill in the art would readily appreciate a washing step may be accomplished by methods known to those in the art, such as by using a semi-automated “flow-through” centrifuge (for example, the Cobe 2991 cell processor, the Baxter CytoMate, or the Haemonetics Cell Saver 5) according to the manufacturer's instructions. After washing, the cells may be resuspended in a variety of biocompatible buffers, such as, for example, Ca-free, Mg-free PBS, PlasmaLyte A, or other saline solution with or without buffer. Alternatively, the undesirable components of the apheresis sample may be removed and the cells directly resuspended in culture media.

[0965] It is recognized that the methods of the application can utilize culture media conditions comprising 5% or less, for example 2%, human AB serum, and employ known culture media conditions and compositions, for example those described in Smith et al., “Ex vivo expansion of human T cells for adoptive immunotherapy using the novel Xeno-free CTS Immune Cell Serum Replacement” Clinical & Translational Immunology (2015) 4, e31; doi:10.1038/cti.2014.31. The culture media may additionally include one or more, e.g., one, LSD1 inhibitor(s) as described herein.

[0966] In one aspect, T cells are isolated from peripheral blood lymphocytes by lysing the red blood cells and depleting the monocytes, for example, by centrifugation through a PERCOLL™ gradient or by counterflow centrifugal elutriation. Once isolated, the cells may be contacted, e.g., ex vivo, with an LSD1 inhibitor as described herein.

[0967] The methods described herein can include, e.g., selection of a specific subpopulation of immune effector cells, e.g., T cells, that are a T regulatory cell-depleted population, CD25+ depleted cells, using, e.g., a negative selection technique, e.g., described herein. Preferably, the population of T regulatory depleted cells contains less than 30%, 25%, 20%, 15%, 10%, 5%, 4%, 3%, 2%, 1% of CD25+ cells. Either before or after selection, the cells may be contacted, e.g., ex vivo, with an LSD1 inhibitor as described herein.

[0968] In one embodiment, T regulatory cells, e.g., CD25+ T cells, are removed from the population using an anti-CD25 antibody, or fragment thereof, or a CD25-binding ligand, IL-2. In one embodiment, the anti-CD25 antibody, or fragment thereof, or CD25-binding ligand is conjugated to a substrate, e.g., a bead, or is otherwise coated on a substrate, e.g., a bead. In one embodiment, the anti-CD25 antibody, or fragment thereof, is conjugated to a substrate as described herein.

[0969] In one embodiment, the T regulatory cells, e.g., CD25+ T cells, are removed from the population using CD25 depletion reagent from Miltenyi™. In one embodiment, the ratio of cells to CD25 depletion reagent is 1e7 cells to 20 uL, or 1e7 cells to 15 uL, or 1e7 cells to 10 uL, or 1e7 cells to 5 uL, or 1e7 cells to 2.5 uL, or 1e7 cells to 1.25 uL. In one embodiment, e.g., for T regulatory cells, e.g., CD25+ depletion, greater than 500 million cells/ml is used. In a further aspect, a concentration of cells of 600, 700, 800, or 900 million cells/ml is used.

[0970] In one embodiment, the population of immune effector cells to be depleted includes about 6×10⁹ CD25+ T cells. In other aspects, the population of immune effector cells to be depleted include about 1×10⁹ to 1×10¹⁰ CD25+ T cell, and any integer value in between. In one embodiment, the resulting population T regulatory depleted cells has 2×10⁹ T regulatory cells, e.g., CD25+ cells, or less (e.g., 1×10⁹, 5×10⁸, 1×10⁸, 5×10⁷, 1×10⁷, or less CD25+ cells).

[0971] In one embodiment, the T regulatory cells, e.g., CD25+ cells, are removed from the population using the CliniMAC system with a depletion tubing set, such as, e.g., tubing 162-01. In one embodiment, the CliniMAC system is run on a depletion setting such as, e.g., DEPLETION2.1.

[0972] Without wishing to be bound by a particular theory, decreasing the level of negative regulators of immune cells (e.g., decreasing the number of unwanted immune cells, e.g., T_{REG} cells), in a subject prior to apheresis or during manufacturing of a CAR-expressing cell product can reduce the risk of subject relapse. For example, methods of depleting T_{REG} cells are known in the art. Methods of decreasing T_{REG} cells include, but are not limited to, cyclophosphamide, anti-GITR antibody (an anti-GITR antibody described herein), CD25-depletion, and combinations thereof. These methods may be combined with the methods of manufacture that include contacting the population of immune effector cells with an LSD1 inhibitor as described herein.

[0973] In some embodiments, the manufacturing methods comprise reducing the number of (e.g., depleting) T_{REG} cells prior to manufacturing of the CAR-expressing cell. For example, manufacturing methods comprise contacting the sample, e.g., the apheresis sample, with an anti-GITR antibody and/or an anti-CD25 antibody (or fragment thereof, or a CD25-binding ligand), e.g., to deplete T_{REG} cells prior to manufacturing of the CAR-expressing cell (e.g., T cell, NK cell) product. These methods may be combined with the methods of manufacture that include contacting the population of immune effector cells with an LSD1 inhibitor as described herein.

[0974] In an embodiment, a subject is pre-treated with one or more therapies that reduce T_{REG} cells prior to collection of cells for CAR-expressing cell product manufacturing, thereby reducing the risk of subject relapse to CAR-expressing cell treatment. In an embodiment, methods of decreasing T_{REG} cells include, but are not limited to, administration to the subject of one or more of cyclophosphamide, anti-GITR antibody, CD25-depletion, or a combination thereof. Administration of one or more of cyclophosphamide, anti-GITR antibody, CD25-depletion, or a combination thereof, can occur before, during or after an infusion of the CAR-expressing cell product. These methods may be combined with the methods of manufacture that include contacting the population of immune effector cells with an LSD1 inhibitor as described herein.

[0975] In an embodiment, a subject is pre-treated with cyclophosphamide prior to collection of cells for CAR-expressing cell product manufacturing, thereby reducing the risk of subject relapse to CAR-expressing cell treatment. In an embodiment, a subject is pre-treated with an anti-GITR antibody prior to collection of cells for CAR-expressing cell product manufacturing, thereby reducing the risk of subject relapse to CAR-expressing cell treatment. These methods may be combined with the methods of manufacture that include contacting the population of immune effector cells with an LSD1 inhibitor as described herein.

[0976] In one embodiment, the population of cells to be removed are neither the regulatory T cells or tumor cells, but cells that otherwise negatively affect the expansion and/or function of CART cells, e.g. cells expressing CD14, CD11b, CD33, CD15, or other markers expressed by potentially immune suppressive cells. In one embodiment, such cells are envisioned to be removed concurrently with regulatory T cells and/or tumor cells, or following said depletion, or in another order.

[0977] The methods described herein can include more than one selection step, e.g., more than one depletion step. Enrichment of a T cell population by negative selection can be accomplished, e.g., with a combination of antibodies directed to surface markers unique to the negatively selected cells. One method is cell sorting and/or selection via negative magnetic immunoadherence or flow cytometry that uses a cocktail of monoclonal antibodies directed to cell surface markers present on the cells negatively selected. For example, to enrich for CD4+ cells by negative selection, a monoclonal antibody cocktail can include antibodies to CD14, CD20, CD11b, CD16, HLA-DR, and CD8. These steps may be combined with the methods of manufacture that include contacting the population of immune effector cells with an LSD1 inhibitor as described herein.

[0978] The methods described herein can further include removing cells from the population which express a tumor antigen, e.g., a tumor antigen that does not comprise CD25, e.g., CD19, CD30, CD38, CD123, CD20, CD14 or CD11b, to thereby provide a population of T regulatory depleted, e.g., CD25+ depleted, and tumor antigen depleted cells that are suitable for expression of a CAR, e.g., a CAR described herein. In one embodiment, tumor antigen expressing cells are removed simultaneously with the T regulatory, e.g., CD25+ cells. For example, an anti-CD25 antibody, or fragment thereof, and an anti-tumor antigen antibody, or fragment thereof, can be attached to the same substrate, e.g., bead, which can be used to remove the cells or an anti-CD25 antibody, or fragment thereof, or the anti-tumor antigen antibody, or fragment thereof, can be attached to separate beads, a mixture of which can be used to remove the cells. In other embodiments, the removal of T regulatory cells, e.g., CD25+ cells, and the removal of the tumor antigen expressing cells is sequential, and can occur, e.g., in either order. These steps may be combined with the methods of manufacture that include contacting the population of immune effector cells with an LSD1 inhibitor as described herein.

[0979] Also provided are methods that include removing cells from the population which express a check point inhibitor, e.g., a check point inhibitor described herein, e.g., one or more of PD1+ cells, LAG3+ cells, and TIM3+ cells, to thereby provide a population of T regulatory depleted, e.g., CD25+ depleted cells, and check point inhibitor depleted cells, e.g., PD1+, LAG3+ and/or TIM3+ depleted cells. Exemplary check point inhibitors include B7-H1, B7-1, CD160, P1H, 2B4, PD1, TIM3, CEACAM (e.g., CEACAM-1, CEACAM-3 and/or CEACAM-5), LAG3, TIGIT, CTLA-4, BTLA and LAIR1. In one embodiment, check point inhibitor expressing cells are removed simultaneously with the T regulatory, e.g., CD25+ cells. For example, an anti-CD25 antibody, or fragment thereof, and an anti-check point inhibitor antibody, or fragment thereof, can be attached to the same bead which can be used to remove the cells, or an anti-CD25 antibody, or fragment thereof, and the anti-check point inhibitor antibody, or fragment there, can be attached to separate beads, a mixture of which can be used to remove the cells. In other embodiments, the removal of T regulatory cells, e.g., CD25+ cells, and the removal of the check point inhibitor expressing cells is sequential, and can occur, e.g., in either order. These steps may be combined with the methods of manufacture that include contacting the population of immune effector cells with an LSD1 inhibitor as described herein.

[0980] Methods described herein can include a positive selection step. For example, T cells can isolated by incubation with anti-CD3/anti-CD28 (e.g., 3×28)-conjugated beads, such as DYNABEADS® M-450 CD3/CD28 T, for a time period sufficient for positive selection of the desired T cells. In one embodiment, the time period is about 30 minutes. In a further embodiment, the time period ranges from 30 minutes to 36 hours or longer and all integer values there between. In a further embodiment, the time period is at least 1, 2, 3, 4, 5, or 6 hours. In yet another embodiment, the time period is 10 to 24 hours, e.g., 24 hours. Longer incubation times may be used to isolate T cells in any situation where there are few T cells as compared to other cell types, such in isolating tumor infiltrating lymphocytes (TIL) from tumor tissue or from immunocompromised individuals. Further, use of longer incubation times can increase the efficiency of capture of CD8+ T cells. Thus, by simply shortening or lengthening the time T cells are allowed to bind to the CD3/CD28 beads and/or by increasing or decreasing the ratio of beads to T cells (as described further herein), subpopulations of T cells can be preferentially selected for or against at culture initiation or at other time points during the process. Additionally, by increasing or decreasing the ratio of anti-CD3 and/or anti-CD28 antibodies on the beads or other surface, subpopulations of T cells can be preferentially selected for or against at culture initiation or at other desired time points. These steps may be combined with the methods of manufacture that include contacting the population of immune effector cells with an LSD1 inhibitor as described herein.

[0981] In one embodiment, a T cell population can be selected that expresses one or more of IFN-γ, TNFα, IL-17A, IL-2, IL-3, IL-4, GM-CSF, IL-10, IL-13, granzyme B, and perforin, or other appropriate molecules, e.g., other cytokines. Methods for screening for cell expression can be determined, e.g., by the methods described in PCT Publication No.: WO 2013/126712.

[0982] For isolation of a desired population of cells by positive or negative selection, the concentration of cells and surface (e.g., particles such as beads) can be varied. In certain aspects, it may be desirable to significantly decrease the volume in which beads and cells are mixed together (e.g., increase the concentration of cells), to ensure maximum contact of cells and beads. For example, in one aspect, a concentration of 10 billion cells/ml, 9 billion/ml, 8 billion/ml, 7 billion/ml, 6 billion/ml, or 5 billion/ml is used. In one aspect, a concentration of 1 billion cells/ml is used. In yet one aspect, a concentration of cells from 75, 80, 85, 90, 95, or 100 million cells/ml is used. In further aspects, concentrations of 125 or 150 million cells/ml can be used.

[0983] Using high concentrations can result in increased cell yield, cell activation, and cell expansion. Further, use of high cell concentrations allows more efficient capture of cells that may weakly express target antigens of interest, such as CD28-negative T cells, or from samples where there are many tumor cells present (e.g., leukemic blood, tumor tissue, etc.). Such populations of cells may have therapeutic value and would be desirable to obtain. For example, using high concentration of cells allows more efficient selection of CD8+ T cells that normally have weaker CD28 expression.

[0984] In a related aspect, it may be desirable to use lower concentrations of cells. By significantly diluting the mixture of T cells and surface (e.g., particles such as beads), interactions between the particles and cells are minimized. This selects for cells that express high amounts of desired antigens to be bound to the particles. For example, CD4+ T cells express higher levels of CD28 and are more efficiently captured than CD8+ T cells in dilute concentrations. In one aspect, the concentration of cells used is 5×10⁶/ml. In other aspects, the concentration used can be from about 1×10⁵/ml to 1×10⁶/ml, and any integer value in between.

[0985] In other aspects, the cells may be incubated on a rotator for varying lengths of time at varying speeds at either 2-10° C. or at room temperature.

[0986] T cells for stimulation can also be frozen after a washing step. Wishing not to be bound by theory, the freeze and subsequent thaw step provide a more uniform product by removing granulocytes and to some extent monocytes in the cell population. After the washing step that removes plasma and platelets, the cells may be suspended in a freezing solution. While many freezing solutions and parameters are known in the art and will be useful in this context, one method involves using PBS containing 20% DMSO and 8% human serum albumin, or culture media containing 10% Dextran 40 and 5% Dextrose, 20% Human Serum Albumin and 7.5% DMSO, or 31.25% Plasmalyte-A, 31.25% Dextrose 5%, 0.45% NaCl, 10% Dextran 40 and 5% Dextrose, 20% Human Serum Albumin, and 7.5% DMSO or other suitable cell freezing media containing for example, Hespan and PlasmaLyte A, the cells then are frozen to −80° C. at a rate of 1° per minute and stored in the vapor phase of a liquid nitrogen storage tank. Other methods of controlled freezing may be used as well as uncontrolled freezing immediately at −20° C. or in liquid nitrogen.

[0987] In certain aspects, cryopreserved cells are thawed and washed as described herein and allowed to rest for one hour at room temperature prior to activation using the methods of the present invention.

[0988] Also contemplated in the context of the invention is the collection of blood samples or apheresis product from a subject at a time period prior to when the expanded cells as described herein might be needed. As such, the source of the cells to be expanded can be collected at any time point necessary, and desired cells, such as T cells, can be isolated and frozen for later use in immune effector cell therapy for any number of diseases or conditions that would benefit from immune effector cell therapy, such as those described herein. In one aspect a blood sample or an apheresis is taken from a generally healthy subject. In certain aspects, a blood sample or an apheresis is taken from a generally healthy subject who is at risk of developing a disease, but who has not yet developed a disease, and the cells of interest are isolated and frozen for later use. In certain aspects, the T cells may be expanded, frozen, and used at a later time. In certain aspects, samples are collected from a patient shortly after diagnosis of a particular disease as described herein but prior to any treatments. In a further aspect, the cells are isolated from a blood sample or an apheresis from a subject prior to any number of relevant treatment modalities, including but not limited to treatment with agents such as natalizumab, efalizumab, antiviral agents, chemotherapy, radiation, immunosuppressive agents, such as cyclosporin, azathioprine, methotrexate, mycophenolate, and FK506, antibodies, or other immunoablative agents such as CAMPATH, anti-CD3 antibodies, cytoxan, fludarabine, cyclosporin, FK506, rapamycin, mycophenolic acid, steroids, FR901228, and irradiation.

[0989] In a further aspect of the present invention, T cells are obtained from a patient directly following treatment that leaves the subject with functional T cells. In this regard, it has been observed that following certain cancer treatments, in particular treatments with drugs that damage the immune system, shortly after treatment during the period when patients would normally be recovering from the treatment, the quality of T cells obtained may be optimal or improved for their ability to expand ex vivo. Likewise, following ex vivo manipulation using the methods described herein, these cells may be in a preferred state for enhanced engraftment and in vivo expansion. Thus, it is contemplated within the context of the present invention to collect blood cells, including T cells, dendritic cells, or other cells of the hematopoietic lineage, during this recovery phase. Further, in certain aspects, mobilization (for example, mobilization with GM-CSF) and conditioning regimens can be used to create a condition in a subject wherein repopulation, recirculation, regeneration, and/or expansion of particular cell types is favored, especially during a defined window of time following therapy. Illustrative cell types include T cells, B cells, dendritic cells, and other cells of the immune system.

[0990] In one embodiment, the immune effector cells expressing a CAR molecule, e.g., a CAR molecule described herein, are obtained from a subject that has received an LSD1 inhibitor. In an embodiment, the population of immune effector cells, e.g., T cells, to be engineered to express a CAR, are harvested after a sufficient time, or after sufficient dosing of the LSD1 inhibitor, such that the level of PD1 negative immune effector cells, e.g., T cells, or the ratio of PD1 negative immune effector cells, e.g., T cells/PD1 positive immune effector cells, e.g., T cells, in the subject or harvested from the subject has been, at least transiently, increased.

[0991] In other embodiments, population of immune effector cells, e.g., T cells, which have, or will be engineered to express a CAR, can be treated ex vivo by contact with an amount of an LSD1 inhibitor that increases the number of PD1 negative immune effector cells, e.g., T cells or increases the ratio of PD1 negative immune effector cells, e.g., T cells/PD1 positive immune effector cells, e.g., T cells.

[0992] In one embodiment, a T cell population is diaglycerol kinase (DGK)-deficient. DGK-deficient cells include cells that do not express DGK RNA or protein, or have reduced or inhibited DGK activity. DGK-deficient cells can be generated by genetic approaches, e.g., administering RNA-interfering agents, e.g., siRNA, shRNA, miRNA, to reduce or prevent DGK expression. Alternatively, DGK-deficient cells can be generated by treatment with DGK inhibitors described herein.

[0993] In one embodiment, a T cell population is Ikaros-deficient. Ikaros-deficient cells include cells that do not express Ikaros RNA or protein, or have reduced or inhibited Ikaros activity, Ikaros-deficient cells can be generated by genetic approaches, e.g., administering RNA-interfering agents, e.g., siRNA, shRNA, miRNA, to reduce or prevent Ikaros expression. Alternatively, Ikaros-deficient cells can be generated by treatment with Ikaros inhibitors, e.g., lenalidomide.

[0994] In embodiments, a T cell population is DGK-deficient and Ikaros-deficient, e.g., does not express DGK and Ikaros, or has reduced or inhibited DGK and Ikaros activity. Such DGK and Ikaros-deficient cells can be generated by any of the methods described herein.

[0995] In an embodiment, the NK cells are obtained from the subject. In another embodiment, the NK cells are an NK cell line, e.g., NK-92 cell line (Conkwest).

### Additional Expressed Agents

[0996] In another embodiment, a CAR-expressing immune effector cell described herein can further express another agent, e.g., an agent which enhances the activity of a CAR-expressing cell. For example, in one embodiment, the agent can be an agent which inhibits an inhibitory molecule. Examples of inhibitory molecules include PD-1, PD-L1, CTLA-4, TIM-3, CEACAM (e.g., CEACAM-1, CEACAM-3 and/or CEACAM-5), LAG-3, VISTA, BTLA, TIGIT, LAIR1, CD160, 2B4 and TGF beta, e.g., as described herein. In one embodiment, the agent that inhibits an inhibitory molecule comprises a first polypeptide, e.g., an inhibitory molecule, associated with a second polypeptide that provides a positive signal to the cell, e.g., an intracellular signaling domain described herein. In one embodiment, the agent comprises a first polypeptide, e.g., of an inhibitory molecule such as PD-1, PD-L1, CTLA-4, TIM-3, CEACAM (e.g., CEACAM-1, CEACAM-3 and/or CEACAM-5), LAG-3, VISTA, BTLA, TIGIT, LAIR1, CD160, 2B4 or TGF beta, or a fragment of any of these, and a second polypeptide which is an intracellular signaling domain described herein (e.g., comprising a costimulatory domain (e.g., 41BB, CD27 or CD28, e.g., as described herein) and/or a primary signaling domain (e.g., a CD3 zeta signaling domain described herein). In one embodiment, the agent comprises a first polypeptide of PD-1 or a fragment thereof, and a second polypeptide of an intracellular signaling domain described herein (e.g., a CD28, CD27, OX40 or 4-IBB signaling domain described herein and/or a CD3 zeta signaling domain described herein).

[0997] In one embodiment, the CAR-expressing immune effector cell described herein can further comprise a second CAR, e.g., a second CAR that includes a different antigen binding domain, e.g., to the same target (e.g., a target described above) or a different target. In one embodiment, the second CAR includes an antigen binding domain to a target expressed on the same cancer cell type as the target of the first CAR. In one embodiment, the CAR-expressing immune effector cell comprises a first CAR that targets a first antigen and includes an intracellular signaling domain having a costimulatory signaling domain but not a primary signaling domain, and a second CAR that targets a second, different, antigen and includes an intracellular signaling domain having a primary signaling domain but not a costimulatory signaling domain.

[0998] While not wishing to be bound by theory, placement of a costimulatory signaling domain, e.g., 4-1BB, CD28, CD27 or OX-40, onto the first CAR, and the primary signaling domain, e.g., CD3 zeta, on the second CAR can limit the CAR activity to cells where both targets are expressed. In one embodiment, the CAR expressing immune effector cell comprises a first CAR that includes an antigen binding domain that targets, e.g., a target described above, a transmembrane domain and a costimulatory domain and a second CAR that targets an antigen other than antigen targeted by the first CAR (e.g., an antigen expressed on the same cancer cell type as the first target) and includes an antigen binding domain, a transmembrane domain and a primary signaling domain. In another embodiment, the CAR expressing immune effector cell comprises a first CAR that includes an antigen binding domain that targets, e.g., a target described above, a transmembrane domain and a primary signaling domain and a second CAR that targets an antigen other than antigen targeted by the first CAR (e.g., an antigen expressed on the same cancer cell type as the first target) and includes an antigen binding domain to the antigen, a transmembrane domain and a costimulatory signaling domain.

[0999] In one embodiment, the CAR-expressing immune effector cell comprises a CAR described herein, e.g., a CAR to a target described above, and an inhibitory CAR. In one embodiment, the inhibitory CAR comprises an antigen binding domain that binds an antigen found on normal cells but not cancer cells, e.g., normal cells that also express the target. In one embodiment, the inhibitory CAR comprises the antigen binding domain, a transmembrane domain and an intracellular domain of an inhibitory molecule. For example, the intracellular domain of the inhibitory CAR can be an intracellular domain of PD1, PD-L1, CTLA-4, TIM-3, CEACAM (e.g., CEACAM-1, CEACAM-3 and/or CEACAM-5), LAG-3, VISTA, BTLA, TIGIT, LAIR1, CD160, 2B4 or TGF beta.

[1000] In one embodiment, an immune effector cell (e.g., T cell, NK cell) comprises a first CAR comprising an antigen binding domain that binds to a tumor antigen as described herein, and a second CAR comprising a PD1 extracellular domain or a fragment thereof.

[1001] In one embodiment, the cell further comprises an inhibitory molecule as described above.

[1002] In one embodiment, the second CAR in the cell is an inhibitory CAR, wherein the inhibitory CAR comprises an antigen binding domain, a transmembrane domain, and an intracellular domain of an inhibitory molecule. The inhibitory molecule can be chosen from one or more of: PD1, PD-L1, CTLA-4, TIM-3, LAG-3, VISTA, BTLA, TIGIT, LAIR1, CD160, 2B4, TGF beta, CEACAM-1, CEACAM-3, and CEACAM-5. In one embodiment, the second CAR molecule comprises the extracellular domain of PD1 or a fragment thereof.

[1003] In embodiments, the second CAR molecule in the cell further comprises an intracellular signaling domain comprising a primary signaling domain and/or an intracellular signaling domain.

[1004] In other embodiments, the intracellular signaling domain in the cell comprises a primary signaling domain comprising the functional domain of CD3 zeta and a costimulatory signaling domain comprising the functional domain of 4-1BB.

[1005] In one embodiment, the second CAR molecule in the cell comprises the amino acid sequence of SEQ ID NO: 26.

[1006] In certain embodiments, the antigen binding domain of the first CAR molecule comprises a scFv and the antigen binding domain of the second CAR molecule does not comprise a scFv. For example, the antigen binding domain of the first CAR molecule comprises a scFv and the antigen binding domain of the second CAR molecule comprises a camelid VHH domain.

### Split CAR

[1007] In some embodiments, the CAR-expressing cell uses a split CAR. The split CAR approach is described in more detail in publications WO2014/055442 and WO2014/055657. Briefly, a split CAR system comprises a cell expressing a first CAR having a first antigen binding domain and a costimulatory domain (e.g., 41BB), and the cell also expresses a second CAR having a second antigen binding domain and an intracellular signaling domain (e.g., CD3 zeta). When the cell encounters the first antigen, the costimulatory domain is activated, and the cell proliferates. When the cell encounters the second antigen, the intracellular signaling domain is activated and cell-killing activity begins. Thus, the CAR-expressing cell is only fully activated in the presence of both antigens.

### Multiple CAR Expression

[1008] In one aspect, the CAR-expressing cell described herein can further comprise a second CAR, e.g., a second CAR that includes a different antigen binding domain, e.g., to the same target or a different target (e.g., a target other than a cancer associated antigen described herein or a different cancer associated antigen described herein). In one embodiment, the second CAR includes an antigen binding domain to a target expressed the same cancer cell type as the cancer associated antigen. In one embodiment, the CAR-expressing cell comprises a first CAR that targets a first antigen and includes an intracellular signaling domain having a costimulatory signaling domain but not a primary signaling domain, and a second CAR that targets a second, different, antigen and includes an intracellular signaling domain having a primary signaling domain but not a costimulatory signaling domain. While not wishing to be bound by theory, placement of a costimulatory signaling domain, e.g., 4-1BB, CD28, CD27 or OX-40, onto the first CAR, and the primary signaling domain, e.g., CD3 zeta, on the second CAR can limit the CAR activity to cells where both targets are expressed. In one embodiment, the CAR expressing cell comprises a first cancer associated antigen CAR that includes an antigen binding domain that binds a target antigen described herein, a transmembrane domain and a costimulatory domain and a second CAR that targets a different target antigen (e.g., an antigen expressed on that same cancer cell type as the first target antigen) and includes an antigen binding domain, a transmembrane domain and a primary signaling domain. In another embodiment, the CAR expressing cell comprises a first CAR that includes an antigen binding domain that binds a target antigen described herein, a transmembrane domain and a primary signaling domain and a second CAR that targets an antigen other than the first target antigen (e.g., an antigen expressed on the same cancer cell type as the first target antigen) and includes an antigen binding domain to the antigen, a transmembrane domain and a costimulatory signaling domain.

[1009] In some embodiments, the claimed invention comprises a first and second CAR, wherein the antigen binding domain of one of said first CAR said second CAR does not comprise a variable light domain and a variable heavy domain. In some embodiments, the antigen binding domain of one of said first CAR said second CAR is an scFv, and the other is not an scFv. In some embodiments, the antigen binding domain of one of said first CAR said second CAR comprises a single VH domain, e.g., a camelid, shark, or lamprey single VH domain, or a single VH domain derived from a human or mouse sequence. In some embodiments, the antigen binding domain of one of said first CAR said second CAR comprises a nanobody. In some embodiments, the antigen binding domain of one of said first CAR said second CAR comprises a camelid VHH domain.

### Allogeneic Cells

[1010] In embodiments described herein, the immune effector cell can be an allogeneic immune effector cell, e.g., T cell or NK cell. For example, the cell can be an allogeneic T cell, e.g., an allogeneic T cell lacking expression of a functional T cell receptor (TCR) and/or human leukocyte antigen (HLA), e.g., HLA class I and/or HLA class II.

[1011] A T cell lacking a functional TCR can be, e.g., engineered such that it does not express any functional TCR on its surface, engineered such that it does not express one or more subunits that comprise a functional TCR or engineered such that it produces very little functional TCR on its surface. Alternatively, the T cell can express a substantially impaired TCR, e.g., by expression of mutated or truncated forms of one or more of the subunits of the TCR. The term “substantially impaired TCR” means that this TCR will not elicit an adverse immune reaction in a host. A T cell described herein can be, e.g., engineered such that it does not express a functional HLA on its surface. For example, a T cell described herein, can be engineered such that cell surface expression HLA, e.g., HLA class 1 and/or HLA class II, is downregulated.

[1012] In some embodiments, the T cell can lack a functional TCR and a functional HLA, e.g., HLA class I and/or HLA class II.

[1013] Modified T cells that lack expression of a functional TCR and/or HLA can be obtained by any suitable means, including a knock out or knock down of one or more subunit of TCR or HLA. For example, the T cell can include a knock down of TCR and/or HLA using siRNA, shRNA, clustered regularly interspaced short palindromic repeats (CRISPR) transcription-activator like effector nuclease (TALEN), or zinc finger endonuclease (ZFN).

[1014] In some embodiments, the allogeneic cell can be a cell which does not express or expresses at low levels an inhibitory molecule, e.g. by any method described herein. For example, the cell can be a cell that does not express or expresses at low levels an inhibitory molecule, e.g., that can decrease the ability of a CAR-expressing cell to mount an immune effector response. Examples of inhibitory molecules include PD1, PD-L1, CTLA4, TIM3, CEACAM (e.g., CEACAM-1, CEACAM-3 and/or CEACAM-5), LAG3, VISTA, BTLA, TIGIT, LAIR1, CD160, 2B4 and TGF beta. Inhibition of an inhibitory molecule, e.g., by inhibition at the DNA, RNA or protein level, can optimize a CAR-expressing cell performance. In embodiments, an inhibitory nucleic acid, e.g., an inhibitory nucleic acid, e.g., a dsRNA, e.g., an siRNA or shRNA, a clustered regularly interspaced short palindromic repeats (CRISPR), a transcription-activator like effector nuclease (TALEN), or a zinc finger endonuclease (ZFN), e.g., as described herein, can be used.

siRNA and shRNA to Inhibit TCR or HLA

[1015] In some embodiments, TCR expression and/or HLA expression can be inhibited using siRNA or shRNA that targets a nucleic acid encoding a TCR and/or HLA in a T cell.

### CRISPR Systems to Inhibit TCR or HLA

[1016] “CRISPR system to TCR and/or HLA” or “CRISPR to inhibit TCR and/or HLA” as used herein refers to a CRISPR system (e.g., a CRISPR/Cas9 system) comprising one or more guide RNA molecules comprising a targeting domain complementary to target sequence within a gene for a component of the TCR and/or HLA or beta-2 microglobulin (B2M), and a RNA-guided endonuclease (e.g., a Cas, e.g., a Cas9).

[1017] Artificial CRISPR/Cas systems can be generated which inhibit TCR and/or HLA, using technology known in the art, e.g., that are described in U.S. Publication No. 20140068797, and Cong (2013) Science 339: 819-823. Other artificial CRISPR/Cas systems that are known in the art may also be generated which inhibit TCR and/or HLA, e.g., that described in Tsai (2014) Nature Biotechnol., 32:6 569-576, U.S. Pat. Nos. 8,871,445; 8,865,406; 8,795,965; 8,771,945; and 8,697,359.

TALEN to Inhibit TCR and/or HLA

[1018] “TALEN genome editing system to HLA and/or TCR” or “TALEN to inhibit HLA and/or TCR” refers to a transcription activator-like effector nuclease, an artificial nuclease which can be used to edit the HLA and/or TCR gene.

[1019] TALENs are produced artificially by fusing a TAL effector DNA binding domain to a DNA cleavage domain. Transcription activator-like effects (TALEs) can be engineered to bind any desired DNA sequence, including a portion of the HLA or TCR gene. By combining an engineered TALE with a DNA cleavage domain, a restriction enzyme can be produced which is specific to any desired DNA sequence, including a HLA or TCR sequence. These can then be introduced into a cell, wherein they can be used for genome editing. Boch (2011) Nature Biotech. 29: 135-6; and Boch et al. (2009) Science 326: 1509-12; Moscou et al. (2009) Science 326: 3501.

[1020] TALENs specific to sequences in HLA or TCR can be constructed using any method known in the art, including various schemes using modular components. Zhang et al. (2011) Nature Biotech. 29: 149-53; Geibler et al. (2011) PLoS ONE 6: e19509.

Zinc Finger Nuclease to Inhibit HLA and/or TCR

[1021] “ZFN genome editing system to HLA and/or TCR” or “ZFN to inhibit HLA and/or TCR” refer to a zinc finger nuclease, an artificial nuclease which can be used to edit the HLA and/or TCR gene.

[1022] ZFNs specific to sequences in HLA AND/OR TCR can be constructed using any method known in the art. See, e.g., Provasi (2011) Nature Med. 18: 807-815; Torikai (2013) Blood 122: 1341-1349; Cathomen et al. (2008) Mol. Ther. 16: 1200-7; Guo et al. (2010) J. Mol. Biol. 400: 96; U.S. Patent Publication 2011/0158957; and U.S. Patent Publication 2012/0060230.

### Telomerase Expression

[1023] While not wishing to be bound by any particular theory, in some embodiments, a therapeutic T cell has short term persistence in a patient, due to shortened telomeres in the T cell; accordingly, transfection with a telomerase gene can lengthen the telomeres of the T cell and improve persistence of the T cell in the patient. See Carl June, “Adoptive T cell therapy for cancer in the clinic”, Journal of Clinical Investigation, 117:1466-1476 (2007). Thus, in an embodiment, an immune effector cell, e.g., a T cell, ectopically expresses a telomerase subunit, e.g., the catalytic subunit of telomerase, e.g., TERT, e.g., hTERT. In some aspects, this disclosure provides a method of producing a CAR-expressing cell, comprising contacting a cell with a nucleic acid encoding a telomerase subunit, e.g., the catalytic subunit of telomerase, e.g., TERT, e.g., hTERT. The cell may be contacted with the nucleic acid before, simultaneous with, or after being contacted with a construct encoding a CAR.

### Expansion and Activation

[1024] Immune effector cells such as T cells may be activated and expanded generally using methods as described, for example, in U.S. Pat. Nos. 6,352,694; 6,534,055; 6,905,680; 6,692,964; 5,858,358; 6,887,466; 6,905,681; 7,144,575; 7,067,318; 7,172,869; 7,232,566; 7,175,843; 5,883,223; 6,905,874; 6,797,514; 6,867,041; and U.S. Patent Application Publication No. 20060121005, each of which is incorporated by reference in its entirety.

[1025] Generally, a population of immune effector cells e.g., T cells, may be expanded by contact with a surface having attached thereto an agent that stimulates a CD3/TCR complex associated signal and a ligand that stimulates a costimulatory molecule on the surface of the T cells. In particular, T cell populations may be stimulated as described herein, such as by contact with an anti-CD3 antibody, or antigen-binding fragment thereof, or an anti-CD2 antibody immobilized on a surface, or by contact with a protein kinase C activator (e.g., bryostatin) in conjunction with a calcium ionophore. For co-stimulation of an accessory molecule on the surface of the T cells, a ligand that binds the accessory molecule is used. For example, a population of T cells can be contacted with an anti-CD3 antibody and an anti-CD28 antibody, under conditions appropriate for stimulating proliferation of the T cells. To stimulate proliferation of either CD4+ T cells or CD8+ T cells, an anti-CD3 antibody and an anti-CD28 antibody can be used. Examples of an anti-CD28 antibody include 9.3, B-T3, XR-CD28 (Diaclone, Besangon, France) can be used as can other methods commonly known in the art (Berg et al., Transplant Proc. 30(8):3975-3977, 1998; Haanen et al., J. Exp. Med. 190(9):13191328, 1999; Garland et al., J. Immunol Meth. 227(1-2):53-63, 1999).

[1026] In certain aspects, the primary stimulatory signal and the costimulatory signal for the T cell may be provided by different protocols. For example, the agents providing each signal may be in solution or coupled to a surface. When coupled to a surface, the agents may be coupled to the same surface (i.e., in “cis” formation) or to separate surfaces (i.e., in “trans” formation). Alternatively, one agent may be coupled to a surface and the other agent in solution. In one aspect, the agent providing the costimulatory signal is bound to a cell surface and the agent providing the primary activation signal is in solution or coupled to a surface. In certain aspects, both agents can be in solution. In one aspect, the agents may be in soluble form, and then cross-linked to a surface, such as a cell expressing Fc receptors or an antibody or other binding agent which will bind to the agents. In this regard, see for example, U.S. Patent Application Publication Nos. 20040101519 and 20060034810 for artificial antigen presenting cells (aAPCs) that are contemplated for use in activating and expanding T cells in the present invention.

[1027] In one aspect, the two agents are immobilized on beads, either on the same bead, i.e., “cis,” or to separate beads, i.e., “trans.” By way of example, the agent providing the primary activation signal is an anti-CD3 antibody or an antigen-binding fragment thereof and the agent providing the costimulatory signal is an anti-CD28 antibody or antigen-binding fragment thereof; and both agents are co-immobilized to the same bead in equivalent molecular amounts. In one aspect, a 1:1 ratio of each antibody bound to the beads for CD4+ T cell expansion and T cell growth is used. In certain aspects of the present invention, a ratio of anti CD3:CD28 antibodies bound to the beads is used such that an increase in T cell expansion is observed as compared to the expansion observed using a ratio of 1:1. In one particular aspect an increase of from about 1 to about 3 fold is observed as compared to the expansion observed using a ratio of 1:1. In one aspect, the ratio of CD3:CD28 antibody bound to the beads ranges from 100:1 to 1:100 and all integer values there between. In one aspect, more anti-CD28 antibody is bound to the particles than anti-CD3 antibody, i.e., the ratio of CD3:CD28 is less than one. In certain aspects, the ratio of anti CD28 antibody to anti CD3 antibody bound to the beads is greater than 2:1. In one particular aspect, a 1:100 CD3:CD28 ratio of antibody bound to beads is used. In one aspect, a 1:75 CD3:CD28 ratio of antibody bound to beads is used. In a further aspect, a 1:50 CD3:CD28 ratio of antibody bound to beads is used. In one aspect, a 1:30 CD3:CD28 ratio of antibody bound to beads is used. In one preferred aspect, a 1:10 CD3:CD28 ratio of antibody bound to beads is used. In one aspect, a 1:3 CD3:CD28 ratio of antibody bound to the beads is used. In yet one aspect, a 3:1 CD3:CD28 ratio of antibody bound to the beads is used.

[1028] Ratios of particles to cells from 1:500 to 500:1 and any integer values in between may be used to stimulate T cells or other target cells. As those of ordinary skill in the art can readily appreciate, the ratio of particles to cells may depend on particle size relative to the target cell. For example, small sized beads could only bind a few cells, while larger beads could bind many. In certain aspects the ratio of cells to particles ranges from 1:100 to 100:1 and any integer values in-between and in further aspects the ratio comprises 1:9 to 9:1 and any integer values in between, can also be used to stimulate T cells. The ratio of anti-CD3- and anti-CD28-coupled particles to T cells that result in T cell stimulation can vary as noted above, however certain preferred values include 1:100, 1:50, 1:40, 1:30, 1:20, 1:10, 1:9, 1:8, 1:7, 1:6, 1:5, 1:4, 1:3, 1:2, 1:1, 2:1, 3:1, 4:1, 5:1, 6:1, 7:1, 8:1, 9:1, 10:1, and 15:1 with one preferred ratio being at least 1:1 particles per T cell. In one aspect, a ratio of particles to cells of 1:1 or less is used. In one particular aspect, a preferred particle: cell ratio is 1:5. In further aspects, the ratio of particles to cells can be varied depending on the day of stimulation. For example, in one aspect, the ratio of particles to cells is from 1:1 to 10:1 on the first day and additional particles are added to the cells every day or every other day thereafter for up to 10 days, at final ratios of from 1:1 to 1:10 (based on cell counts on the day of addition). In one particular aspect, the ratio of particles to cells is 1:1 on the first day of stimulation and adjusted to 1:5 on the third and fifth days of stimulation. In one aspect, particles are added on a daily or every other day basis to a final ratio of 1:1 on the first day, and 1:5 on the third and fifth days of stimulation. In one aspect, the ratio of particles to cells is 2:1 on the first day of stimulation and adjusted to 1:10 on the third and fifth days of stimulation. In one aspect, particles are added on a daily or every other day basis to a final ratio of 1:1 on the first day, and 1:10 on the third and fifth days of stimulation. One of skill in the art will appreciate that a variety of other ratios may be suitable for use in the present invention. In particular, ratios will vary depending on particle size and on cell size and type. In one aspect, the most typical ratios for use are in the neighborhood of 1:1, 2:1 and 3:1 on the first day.

[1029] In further aspects, the cells, such as T cells, are combined with agent-coated beads, the beads and the cells are subsequently separated, and then the cells are cultured. In an alternative aspect, prior to culture, the agent-coated beads and cells are not separated but are cultured together. In a further aspect, the beads and cells are first concentrated by application of a force, such as a magnetic force, resulting in increased ligation of cell surface markers, thereby inducing cell stimulation.

[1030] By way of example, cell surface proteins may be ligated by allowing paramagnetic beads to which anti-CD3 and anti-CD28 are attached (3×28 beads) to contact the T cells. In one aspect the cells (for example, 10⁴ to 10⁹ T cells) and beads (for example, DYNABEADS® M-450 CD3/CD28 T paramagnetic beads at a ratio of 1:1) are combined in a buffer, for example PBS (without divalent cations such as, calcium and magnesium). Again, those of ordinary skill in the art can readily appreciate any cell concentration may be used. For example, the target cell may be very rare in the sample and comprise only 0.01% of the sample or the entire sample (i.e., 100%) may comprise the target cell of interest. Accordingly, any cell number is within the context of the present invention. In certain aspects, it may be desirable to significantly decrease the volume in which particles and cells are mixed together (i.e., increase the concentration of cells), to ensure maximum contact of cells and particles. For example, in one aspect, a concentration of about 10 billion cells/ml, 9 billion/ml, 8 billion/ml, 7 billion/ml, 6 billion/ml, 5 billion/ml, or 2 billion cells/ml is used. In one aspect, greater than 100 million cells/ml is used. In a further aspect, a concentration of cells of 10, 15, 20, 25, 30, 35, 40, 45, or 50 million cells/ml is used. In yet one aspect, a concentration of cells from 75, 80, 85, 90, 95, or 100 million cells/ml is used. In further aspects, concentrations of 125 or 150 million cells/ml can be used. Using high concentrations can result in increased cell yield, cell activation, and cell expansion. Further, use of high cell concentrations allows more efficient capture of cells that may weakly express target antigens of interest, such as CD28-negative T cells. Such populations of cells may have therapeutic value and would be desirable to obtain in certain aspects. For example, using high concentration of cells allows more efficient selection of CD8+ T cells that normally have weaker CD28 expression.

[1031] In one embodiment, cells transduced with a nucleic acid encoding a CAR, e.g., a CAR described herein, are expanded, e.g., by a method described herein. In one embodiment, the cells are expanded in culture for a period of several hours (e.g., about 2, 3, 4, 5, 6, 7, 8, 9, 10, 15, 18, 21 hours) to about 14 days (e.g., 1, 2, 3, 4, 5, 6, 7, 8, 9, 10, 11, 12, 13 or 14 days). In one embodiment, the cells are expanded for a period of 4 to 9 days. In one embodiment, the cells are expanded for a period of 8 days or less, e.g., 7, 6 or 5 days. In one embodiment, the cells are expanded in culture for 5 days, and the resulting cells are more potent than the same cells expanded in culture for 9 days under the same culture conditions. Potency can be defined, e.g., by various T cell functions, e.g. proliferation, target cell killing, cytokine production, activation, migration, or combinations thereof. In one embodiment, the cells are expanded for 5 days show at least a one, two, three or four fold increase in cells doublings upon antigen stimulation as compared to the same cells expanded in culture for 9 days under the same culture conditions. In one embodiment, the cells are expanded in culture for 5 days, and the resulting cells exhibit higher proinflammatory cytokine production, e.g., IFN-γ and/or GM-CSF levels, as compared to the same cells expanded in culture for 9 days under the same culture conditions. In one embodiment, the cells expanded for 5 days show at least a one, two, three, four, five, ten fold or more increase in pg/ml of proinflammatory cytokine production, e.g., IFN-γ and/or GM-CSF levels, as compared to the same cells expanded in culture for 9 days under the same culture conditions.

[1032] Several cycles of stimulation may also be desired such that culture time of T cells can be 60 days or more. Conditions appropriate for T cell culture include an appropriate media (e.g., Minimal Essential Media or RPMI Media 1640 or, X-vivo 15, (Lonza)) that may contain factors necessary for proliferation and viability, including serum (e.g., fetal bovine or human serum), interleukin-2 (IL-2), insulin, IFN-γ, IL-4, IL-7, GM-CSF, IL-10, IL-12, IL-15, TGFβ, and TNF-α or any other additives for the growth of cells known to the skilled artisan. Other additives for the growth of cells include, but are not limited to, surfactant, plasmanate, and reducing agents such as N-acetyl-cysteine and 2-mercaptoethanol. Media can include RPMI 1640, AIM-V, DMEM, MEM, a-MEM, F-12, X-Vivo 15, and X-Vivo 20, Optimizer, with added amino acids, sodium pyruvate, and vitamins, either serum-free or supplemented with an appropriate amount of serum (or plasma) or a defined set of hormones, and/or an amount of cytokine(s) sufficient for the growth and expansion of T cells. Antibiotics, e.g., penicillin and streptomycin, are included only in experimental cultures, not in cultures of cells that are to be infused into a subject. The target cells are maintained under conditions necessary to support growth, for example, an appropriate temperature (e.g., 37° C.) and atmosphere (e.g., air plus 5% CO₂).

[1033] In one embodiment, the cells are expanded in an appropriate media (e.g., media described herein) that includes one or more interleukin that result in at least a 200-fold (e.g., 200-fold, 250-fold, 300-fold, 350-fold) increase in cells over a 14 day expansion period, e.g., as measured by a method described herein such as flow cytometry. In one embodiment, the cells are expanded in the presence of IL-15 and/or IL-7 (e.g., IL-15 and IL-7).

[1034] In embodiments, methods described herein, e.g., CAR-expressing cell manufacturing methods, comprise removing T regulatory cells, e.g., CD25+ T cells, from a cell population, e.g., using an anti-CD25 antibody, or fragment thereof, or a CD25-binding ligand, IL-2. Methods of removing T regulatory cells, e.g., CD25+ T cells, from a cell population are described herein. In embodiments, the methods, e.g., manufacturing methods, further comprise contacting a cell population (e.g., a cell population in which T regulatory cells, such as CD25+ T cells, have been depleted; or a cell population that has previously contacted an anti-CD25 antibody, fragment thereof, or CD25-binding ligand) with IL-15 and/or IL-7. For example, the cell population (e.g., that has previously contacted an anti-CD25 antibody, fragment thereof, or CD25-binding ligand) is expanded in the presence of IL-15 and/or IL-7.

[1035] In some embodiments a CAR-expressing cell described herein is contacted with a composition comprising a interleukin-15 (IL-15) polypeptide, a interleukin-15 receptor alpha (IL-15Ra) polypeptide, or a combination of both a IL-15 polypeptide and a IL-15Ra polypeptide e.g., hetIL-15, during the manufacturing of the CAR-expressing cell, e.g., ex vivo. In embodiments, a CAR-expressing cell described herein is contacted with a composition comprising a IL-15 polypeptide during the manufacturing of the CAR-expressing cell, e.g., ex vivo. In embodiments, a CAR-expressing cell described herein is contacted with a composition comprising a combination of both a IL-15 polypeptide and a IL-15 Ra polypeptide during the manufacturing of the CAR-expressing cell, e.g., ex vivo. In embodiments, a CAR-expressing cell described herein is contacted with a composition comprising hetIL-during the manufacturing of the CAR-expressing cell, e.g., ex vivo.

[1036] In one embodiment the CAR-expressing cell described herein is contacted with a composition comprising hetIL-15 during ex vivo expansion. In an embodiment, the CAR-expressing cell described herein is contacted with a composition comprising an IL-15 polypeptide during ex vivo expansion. In an embodiment, the CAR-expressing cell described herein is contacted with a composition comprising both an IL-15 polypeptide and an IL-15Ra polypeptide during ex vivo expansion. In one embodiment the contacting results in the survival and proliferation of a lymphocyte subpopulation, e.g., CD8+ T cells.

[1037] T cells that have been exposed to varied stimulation times may exhibit different characteristics. For example, typical blood or apheresed peripheral blood mononuclear cell products have a helper T cell population (TH, CD4+) that is greater than the cytotoxic or suppressor T cell population (TC, CD8+). Ex vivo expansion of T cells by stimulating CD3 and CD28 receptors produces a population of T cells that prior to about days 8-9 consists predominately of TH cells, while after about days 8-9, the population of T cells comprises an increasingly greater population of TC cells. Accordingly, depending on the purpose of treatment, infusing a subject with a T cell population comprising predominately of TH cells may be advantageous. Similarly, if an antigen-specific subset of TC cells has been isolated it may be beneficial to expand this subset to a greater degree.

[1038] Further, in addition to CD4 and CD8 markers, other phenotypic markers vary significantly, but in large part, reproducibly during the course of the cell expansion process. Thus, such reproducibility enables the ability to tailor an activated T cell product for specific purposes.

[1039] Once a CAR described herein is constructed, various assays can be used to evaluate the activity of the molecule, such as but not limited to, the ability to expand T cells following antigen stimulation, sustain T cell expansion in the absence of re-stimulation, and anti-cancer activities in appropriate in vitro and animal models. Assays to evaluate the effects of a CAR of the present invention are described in further detail below.

[1040] Western blot analysis of CAR expression in primary T cells can be used to detect the presence of monomers and dimers. See, e.g., Milone et al., Molecular Therapy 17(8): 1453-1464 (2009). Very briefly, T cells (1:1 mixture of CD4⁺ and CD8⁺ T cells) expressing the CARs are expanded in vitro for more than 10 days followed by lysis and SDS-PAGE under reducing conditions. CARs containing the full length TCR-ζcytoplasmic domain and the endogenous TCR-ζ chain are detected by western blotting using an antibody to the TCR-ζ chain. The same T cell subsets are used for SDS-PAGE analysis under non-reducing conditions to permit evaluation of covalent dimer formation.

[1041] In vitro expansion of CAR⁺ T cells following antigen stimulation can be measured by flow cytometry. For example, a mixture of CD4+ and CD8+ T cells are stimulated with αCD3/αCD28 aAPCs followed by transduction with lentiviral vectors expressing GFP under the control of the promoters to be analyzed. Exemplary promoters include the CMV IE gene, EF-1α, ubiquitin C, or phosphoglycerokinase (PGK) promoters. GFP fluorescence is evaluated on day 6 of culture in the CD4⁺ and/or CD8⁺ T cell subsets by flow cytometry. See, e.g., Milone et al., Molecular Therapy 17(8): 1453-1464 (2009). Alternatively, a mixture of CD4⁺ and CD8⁺ T cells are stimulated with αCD3/αCD28 coated magnetic beads on day 0, and transduced with CAR on day 1 using a bicistronic lentiviral vector expressing CAR along with eGFP using a 2A ribosomal skipping sequence. Cultures are re-stimulated with either a cancer associated antigen as described herein⁺ K562 cells (K562 expressing a cancer associated antigen as described herein), wild-type K562 cells (K562 wild type) or K562 cells expressing hCD32 and 4-1BBL in the presence of antiCD3 and anti-CD28 antibody (K562-BBL-3/28) following washing. Exogenous IL-2 is added to the cultures every other day at 100 IU/ml. GFP⁺ T cells are enumerated by flow cytometry using bead-based counting. See, e.g., Milone et al., Molecular Therapy 17(8): 1453-1464 (2009).

[1042] Sustained CAR⁺ T cell expansion in the absence of re-stimulation can also be measured. See, e.g., Milone et al., Molecular Therapy 17(8): 1453-1464 (2009). Briefly, mean T cell volume (fl) is measured on day 8 of culture using a Coulter Multisizer III particle counter, a Nexcelom Cellometer Vision or Millipore Scepter, following stimulation with αCD3/αCD28 coated magnetic beads on day 0, and transduction with the indicated CAR on day 1.

[1043] Animal models can also be used to measure a CART activity. For example, xenograft model using human a cancer associated antigen described herein-specific CAR⁺ T cells to treat a primary human pre-B ALL in immunodeficient mice can be used. See, e.g., Milone et al., Molecular Therapy 17(8): 1453-1464 (2009). Very briefly, after establishment of ALL, mice are randomized as to treatment groups. Different numbers of a cancer associated antigen-specific CARengineered T cells are coinjected at a 1:1 ratio into NOD-SCID-γ^{-/-} mice bearing B-ALL. The number of copies of a cancer associated antigen-specific CAR vector in spleen DNA from mice is evaluated at various times following T cell injection. Animals are assessed for leukemia at weekly intervals. Peripheral blood a cancer associate antigen as described herein+B-ALL blast cell counts are measured in mice that are injected with a cancer associated antigen described hereinζ CAR⁺ T cells or mock-transduced T cells. Survival curves for the groups are compared using the log-rank test. In addition, absolute peripheral blood CD4+ and CD8+ T cell counts 4 weeks following T cell injection in NOD-SCID-γ^{-/-} mice can also be analyzed. Mice are injected with leukemic cells and 3 weeks later are injected with T cells engineered to express CAR by a bicistronic lentiviral vector that encodes the CAR linked to eGFP. T cells are normalized to 45-50% input GFP⁺ T cells by mixing with mock-transduced cells prior to injection, and confirmed by flow cytometry. Animals are assessed for leukemia at 1-week intervals. Survival curves for the CAR: T cell groups are compared using the log-rank test.

[1044] Dose dependent CAR treatment response can be evaluated. See, e.g., Milone et al., Molecular Therapy 17(8): 1453-1464 (2009). For example, peripheral blood is obtained 35-70 days after establishing leukemia in mice injected on day 21 with CAR T cells, an equivalent number of mock-transduced T cells, or no T cells. Mice from each group are randomly bled for determination of peripheral blood a cancer associate antigen as described herein⁺ ALL blast counts and then killed on days 35 and 49. The remaining animals are evaluated on days 57 and 70.

[1045] Assessment of cell proliferation and cytokine production has been previously described, e.g., at Milone et al., Molecular Therapy 17(8): 1453-1464 (2009). Briefly, assessment of CAR-mediated proliferation is performed in microtiter plates by mixing washed T cells with K562 cells expressing a cancer associated antigen described herein (K19) or CD32 and CD137 (KT32-BBL) for a final T-cell:K562 ratio of 2:1. K562 cells are irradiated with gamma-radiation prior to use. Anti-CD3 (clone OKT3) and anti-CD28 (clone 9.3) monoclonal antibodies are added to cultures with KT32-BBL cells to serve as a positive control for stimulating T-cell proliferation since these signals support long-term CD8⁺ T cell expansion ex vivo. T cells are enumerated in cultures using CountBright™ fluorescent beads (Invitrogen, Carlsbad, CA) and flow cytometry as described by the manufacturer. CAR⁺ T cells are identified by GFP expression using T cells that are engineered with eGFP-2A linked CAR-expressing lentiviral vectors. For CAR+ T cells not expressing GFP, the CAR+ T cells are detected with biotinylated recombinant a cancer associate antigen as described herein protein and a secondary avidin-PE conjugate. CD4+ and CD8⁺ expression on T cells are also simultaneously detected with specific monoclonal antibodies (BD Biosciences). Cytokine measurements are performed on supernatants collected 24 hours following re-stimulation using the human TH1/TH2 cytokine cytometric bead array kit (BD Biosciences, San Diego, CA) according the manufacturer's instructions. Fluorescence is assessed using a FACScalibur flow cytometer, and data is analyzed according to the manufacturer's instructions.

[1046] Cytotoxicity can be assessed by a standard 51Cr-release assay. See, e.g., Milone et al., Molecular Therapy 17(8): 1453-1464 (2009). Briefly, target cells (K562 lines and primary pro-B-ALL cells) are loaded with 51Cr (as NaCrO4, New England Nuclear, Boston, MA) at 37° C. for 2 hours with frequent agitation, washed twice in complete RPMI and plated into microtiter plates. Effector T cells are mixed with target cells in the wells in complete RPMI at varying ratios of effector cell:target cell (E:T). Additional wells containing media only (spontaneous release, SR) or a 1% solution of triton-X 100 detergent (total release, TR) are also prepared. After 4 hours of incubation at 37° C., supernatant from each well is harvested. Released 51Cr is then measured using a gamma particle counter (Packard Instrument Co., Waltham, MA). Each condition is performed in at least triplicate, and the percentage of lysis is calculated using the formula: % Lysis=(ER−SR)/(TR−SR), where ER represents the average 51Cr released for each experimental condition.

[1047] Imaging technologies can be used to evaluate specific trafficking and proliferation of CARs in tumor-bearing animal models. Such assays have been described, for example, in Barrett et al., Human Gene Therapy 22:1575-1586 (2011). Briefly, NOD/SCID/γc^{-/-} (NSG) mice are injected IV with Nalm-6 cells followed 7 days later with T cells 4 hour after electroporation with the CAR constructs. The T cells are stably transfected with a lentiviral construct to express firefly luciferase, and mice are imaged for bioluminescence. Alternatively, therapeutic efficacy and specificity of a single injection of CAR⁺ T cells in Nalm-6 xenograft model can be measured as the following: NSG mice are injected with Nalm-6 transduced to stably express firefly luciferase, followed by a single tail-vein injection of T cells engineered to express a CAR of the present invention (e.g., transduced with nucleic acid encoding a CAR of the present invention) 7 days later. Animals are imaged at various time points post injection. For example, photon-density heat maps of firefly luciferasepositive leukemia in representative mice at day 5 (2 days before treatment) and day 8 (24 hr post CAR⁺ PBLs) can be generated.

[1048] Other assays, including those described in the Example section herein as well as those that are known in the art can also be used to evaluate the CARs described herein.

### Methods of Treatment/Combination Therapies

[1049] In another aspect, the present invention provides a method comprising administering the LSD1 inhibitors of the invention in combination with a population of immune effector cells, e.g., engineered to express a CAR molecule, e.g., as described herein, as a therapy. Typically, such administration will be in the form of cells (e.g., autologous or allogeneic host cells) expressing a CAR and separate administration of the LSD1 inhibitor. Alternatively, the LSD1 inhibitor may be administered in the same composition as the cell engineered to express a CAR molecule. Alternatively, the cell engineered to express a CAR molecule may also be engineered to express an LSD1 inhibitor. In one embodiment, the subject has a disorder described herein, e.g., the subject has cancer, e.g., the subject has a cancer which expresses a target antigen described herein. In one embodiment, the subject is a human.

[1050] Methods described herein that comprise administering an LSD1 inhibitor and a CAR-expressing cell described herein may be used in combination with other known agents and therapies.

[1051] Administered “in combination”, as used herein, means that two (or more) different treatments are delivered to the subject during the course of the subject's affliction with the disorder, e.g., the two or more treatments are delivered after the subject has been diagnosed with the disorder and before the disorder has been cured or eliminated or treatment has ceased for other reasons. In some embodiments, the delivery of one treatment is still occurring when the delivery of the second begins, so that there is overlap in terms of administration. This is sometimes referred to herein as “simultaneous” or “concurrent delivery”. In other embodiments, the delivery of one treatment ends before the delivery of the other treatment begins. In some embodiments of either case, the treatment is more effective because of combined administration. For example, the second treatment is more effective, e.g., an equivalent effect is seen with less of the second treatment, or the second treatment reduces symptoms to a greater extent, than would be seen if the second treatment were administered in the absence of the first treatment, or the analogous situation is seen with the first treatment. In some embodiments, delivery is such that the reduction in a symptom, or other parameter related to the disorder is greater than what would be observed with one treatment delivered in the absence of the other. The effect of the two treatments can be partially additive, wholly additive, or greater than additive. The delivery can be such that an effect of the first treatment delivered is still detectable when the second is delivered.

[1052] A CAR-expressing cell described herein, an LSD1 inhibitor, and the at least one additional therapeutic agent can be administered simultaneously, in the same or in separate compositions, or sequentially. The three agents can be administered in any order. For example, in sequential administration, the LSD1 inhibitor and the CAR-expressing cell described herein can be administered first, and the additional agent can be administered second, or the order of administration can be reversed.

[1053] The CAR therapy and/or other therapeutic agents, procedures or modalities can be administered during periods of active disorder, or during a period of remission or less active disease. The CAR therapy can be administered before another treatment, concurrently with the treatment, post-treatment, or during remission of the disorder.

[1054] In another aspect, the invention pertains to a method of treating a subject having a disease associated with expression of a cancer associated antigen as described herein comprising administering to the subject an effective amount of a cell comprising a CAR molecule, e.g., a CAR molecule described herein.

[1055] In one aspect, the invention provides methods for treating a disease associated with expression of a cancer associated antigen as described herein. The method comprises the administration of an LSD1 inhibitor and administration of a cell, e.g., a T cell, e.g., that expresses, or can express a CAR.

[1056] In one aspect, the present invention provides methods of treating cancer by providing to the subject in need thereof an LSD1 inhibitor and immune effector cells (e.g., T cells, NK cells) that are engineered to express an XCAR, wherein X represents a tumor marker (or cancer associated antigen; as used herein, the terms XCAR and CARX are used interchangeably, e.g., a CAR19 or CARCD19 is the same as a CD19 CAR) as described herein, and wherein said cancer cells express said X tumor marker (or cancer associated antigen).

[1057] In one aspect, the present invention provides methods of treating cancer by providing to the subject in need thereof an LSD1 inhibitor and immune effector cells (e.g., T cells, NK cells) that are engineered to express a CD19CAR, wherein the cancer cells express CD19. In one embodiment, the cancer to be treated is ALL (acute lymphoblastic leukemia), CLL (chronic lymphocytic leukemia), DLBCL (diffuse large B-cell lymphoma), MCL (Mantle cell lymphoma, or MM (multiple myeloma).

[1058] In one aspect, the present invention provides methods of treating cancer by providing to the subject in need thereof an LSD1 inhibitor and immune effector cells (e.g., T cells, NK cells) that are engineered to express an EGFRvIIICAR, wherein the cancer cells express EGFRvIII. In one embodiment, the cancer to be treated is glioblastoma.

[1059] In one aspect, the present invention provides methods of treating cancer by providing to the subject in need thereof an LSD1 inhibitor and immune effector cells (e.g., T cells, NK cells) that are engineered to express a mesothelin CAR, wherein the cancer cells express mesothelin. In one embodiment, the cancer to be treated is mesothelioma, pancreatic cancer, or ovarian cancer.

[1060] In one aspect, the present invention provides methods of treating cancer by providing to the subject in need thereof an LSD1 inhibitor and immune effector cells (e.g., T cells, NK cells) that are engineered to express a CD123CAR, wherein the cancer cells express CD123. In one embodiment, the cancer to be treated is AML.

[1061] In one aspect, the present invention provides methods of treating cancer by providing to the subject in need thereof an LSD1 inhibitor and immune effector cells (e.g., T cells, NK cells) that are engineered to express a CD22CAR, wherein the cancer cells express CD22. In one embodiment, the cancer to be treated is B cell malignancies.

[1062] In one aspect, the present invention provides methods of treating cancer by providing to the subject in need thereof an LSD1 inhibitor and immune effector cells (e.g., T cells, NK cells) that are engineered to express a CS-1CAR, wherein the cancer cells express CS-1. In one embodiment, the cancer to be treated is multiple myeloma.

[1063] In one aspect, the present invention provides methods of treating cancer by providing to the subject in need thereof an LSD1 inhibitor and immune effector cells (e.g., T cells, NK cells) that are engineered to express a CLL-1CAR, wherein the cancer cells express CLL-1. In one embodiment, the cancer to be treated is AML.

[1064] In one aspect, the present invention provides methods of treating cancer by providing to the subject in need thereof an LSD1 inhibitor and immune effector cells (e.g., T cells, NK cells) that are engineered to express a CD33CAR, wherein the cancer cells express CD33. In one embodiment, the cancer to be treated is AML.

[1065] In one aspect, the present invention provides methods of treating cancer by providing to the subject in need thereof an LSD1 inhibitor and immune effector cells (e.g., T cells, NK cells) that are engineered to express a GD2CAR, wherein the cancer cells express GD2. In one embodiment, the cancer to be treated is neuroblastoma.

[1066] In one aspect, the present invention provides methods of treating cancer by providing to the subject in need thereof an LSD1 inhibitor and immune effector cells (e.g., T cells, NK cells) that are engineered to express a BCMACAR, wherein the cancer cells express BCMA. In one embodiment, the cancer to be treated is multiple myeloma.

[1067] In one aspect, the present invention provides methods of treating cancer by providing to the subject in need thereof an LSD1 inhibitor and immune effector cells (e.g., T cells, NK cells) that are engineered to express a TnCAR, wherein the cancer cells express Tn antigen. In one embodiment, the cancer to be treated is ovarian cancer.

[1068] In one aspect, the present invention provides methods of treating cancer by providing to the subject in need thereof an LSD1 inhibitor and immune effector cells (e.g., T cells, NK cells) that are engineered to express a PSMACAR, wherein the cancer cells express PSMA. In one embodiment, the cancer to be treated is prostate cancer.

[1069] In one aspect, the present invention provides methods of treating cancer by providing to the subject in need thereof an LSD1 inhibitor and immune effector cells (e.g., T cells, NK cells) that are engineered to express a ROR1CAR, wherein the cancer cells express ROR1. In one embodiment, the cancer to be treated is B cell malignancies.

[1070] In one aspect, the present invention provides methods of treating cancer by providing to the subject in need thereof an LSD1 inhibitor and immune effector cells (e.g., T cells, NK cells) that are engineered to express a FLT3 CAR, wherein the cancer cells express FLT3. In one embodiment, the cancer to be treated is AML.

[1071] In one aspect, the present invention provides methods of treating cancer by providing to the subject in need thereto an LSD1 inhibitor and f immune effector cells (e.g., T cells, NK cells) that are engineered to express a TAG72CAR, wherein the cancer cells express TAG72. In one embodiment, the cancer to be treated is gastrointestinal cancer.

[1072] In one aspect, the present invention provides methods of treating cancer by providing to the subject in need thereof an LSD1 inhibitor and immune effector cells (e.g., T cells, NK cells) that are engineered to express a CD38CAR, wherein the cancer cells express CD38. In one embodiment, the cancer to be treated is multiple myeloma.

[1073] In one aspect, the present invention provides methods of treating cancer by providing to the subject in need thereof an LSD1 inhibitor and immune effector cells (e.g., T cells, NK cells) that are engineered to express a CD44v6CAR, wherein the cancer cells express CD44v6. In one embodiment, the cancer to be treated is cervical cancer, AML, or MM.

[1074] In one aspect, the present invention provides methods of treating cancer by providing to the subject in need thereof an LSD1 inhibitor and immune effector cells (e.g., T cells, NK cells) that are engineered to express a CEACAR, wherein the cancer cells express CEA. In one embodiment, the cancer to be treated is pastrointestinal cancer, or pancreatic cancer.

[1075] In one aspect, the present invention provides methods of treating cancer by providing to the subject in need thereof an LSD1 inhibitor and immune effector cells (e.g., T cells, NK cells) that are engineered to express a EPCAMCAR, wherein the cancer cells express EPCAM. In one embodiment, the cancer to be treated is gastrointestinal cancer.

[1076] In one aspect, the present invention provides methods of treating cancer by providing to the subject in need thereof an LSD1 inhibitor and immune effector cells (e.g., T cells, NK cells) that are engineered to express a B7H3CAR, wherein the cancer cells express B7H3.

[1077] In one aspect, the present invention provides methods of treating cancer by providing to the subject in need thereof an LSD1 inhibitor and immune effector cells (e.g., T cells, NK cells) that are engineered to express a KITCAR, wherein the cancer cells express KIT. In one embodiment, the cancer to be treated is gastrointestinal cancer.

[1078] In one aspect, the present invention provides methods of treating cancer by providing to the subject in need thereof an LSD1 inhibitor and immune effector cells (e.g., T cells, NK cells) that are engineered to express a IL-13Ra2CAR, wherein the cancer cells express IL-13Ra2. In one embodiment, the cancer to be treated is glioblastoma.

[1079] In one aspect, the present invention provides methods of treating cancer by providing to the subject in need thereof an LSD1 inhibitor and immune effector cells (e.g., T cells, NK cells) that are engineered to express a CD30CAR, wherein the cancer cells express CD30. In one embodiment, the cancer to be treated is lymphomas, or leukemias.

[1080] In one aspect, the present invention provides methods of treating cancer by providing to the subject in need thereof an LSD1 inhibitor and immune effector cells (e.g., T cells, NK cells) that are engineered to express a GD3CAR, wherein the cancer cells express GD3. In one embodiment, the cancer to be treated is melanoma.

[1081] In one aspect, the present invention provides methods of treating cancer by providing to the subject in need thereof an LSD1 inhibitor and immune effector cells (e.g., T cells, NK cells) that are engineered to express a CD171CAR, wherein the cancer cells express CD171. In one embodiment, the cancer to be treated is neuroblastoma, ovarian cancer, melanoma, breast cancer, pancreatic cancer, colon cancers, or NSCLC (non-small cell lung cancer).

[1082] In one aspect, the present invention provides methods of treating cancer by providing to the subject in need thereof an LSD1 inhibitor and immune effector cells (e.g., T cells, NK cells) that are engineered to express a IL-11RaCAR, wherein the cancer cells express IL-11Ra. In one embodiment, the cancer to be treated is osteosarcoma.

[1083] In one aspect, the present invention provides methods of treating cancer by providing to the subject in need thereof an LSD1 inhibitor and immune effector cells (e.g., T cells, NK cells) that are engineered to express a PSCACAR, wherein the cancer cells express PSCA. In one embodiment, the cancer to be treated is prostate cancer.

[1084] In one aspect, the present invention provides methods of treating cancer by providing to the subject in need thereof an LSD1 inhibitor and immune effector cells (e.g., T cells, NK cells) that are engineered to express a VEGFR2CAR, wherein the cancer cells express VEGFR2. In one embodiment, the cancer to be treated is a solid tumor.

[1085] In one aspect, the present invention provides methods of treating cancer by providing to the subject in need thereof an LSD1 inhibitor and immune effector cells (e.g., T cells, NK cells) that are engineered to express a LewisYCAR, wherein the cancer cells express LewisY. In one embodiment, the cancer to be treated is ovarian cancer, or AML.

[1086] In one aspect, the present invention provides methods of treating cancer by providing to the subject in need thereof an LSD1 inhibitor and immune effector cells (e.g., T cells, NK cells) that are engineered to express a CD24CAR, wherein the cancer cells express CD24. In one embodiment, the cancer to be treated is pancreatic cancer.

[1087] In one aspect, the present invention provides methods of treating cancer by providing to the subject in need thereof an LSD1 inhibitor and immune effector cells (e.g., T cells, NK cells) that are engineered to express a PDGFR-betaCAR, wherein the cancer cells express PDGFR-beta. In one embodiment, the cancer to be treated is breast cancer, prostate cancer, GIST (gastrointestinal stromal tumor), CML, DFSP (dermatofibrosarcoma protuberans), or glioma.

[1088] In one aspect, the present invention provides methods of treating cancer by providing to the subject in need thereof an LSD1 inhibitor and immune effector cells (e.g., T cells, NK cells) that are engineered to express a SSEA-4CAR, wherein the cancer cells express SSEA-4. In one embodiment, the cancer to be treated is glioblastoma, breast cancer, lung cancer, or stem cell cancer.

[1089] In one aspect, the present invention provides methods of treating cancer by providing to the subject in need thereof an LSD1 inhibitor and immune effector cells (e.g., T cells, NK cells) that are engineered to express a CD20CAR, wherein the cancer cells express CD20. In one embodiment, the cancer to be treated is B cell malignancies.

[1090] In one aspect, the present invention provides methods of treating cancer by providing to the subject in need thereof an LSD1 inhibitor and immune effector cells (e.g., T cells, NK cells) that are engineered to express a Folate receptor alphaCAR, wherein the cancer cells express folate receptor alpha.

[1091] In one embodiment, the cancer to be treated is ovarian cancer, NSCLC, endometrial cancer, renal cancer, or other solid tumors.

[1092] In one aspect, the present invention provides methods of treating cancer by providing to the subject in need thereof an LSD1 inhibitor and immune effector cells (e.g., T cells, NK cells) that are engineered to express an ERBB2CAR, wherein the cancer cells express ERBB2 (Her2/neu). In one embodiment, the cancer to be treated is breast cancer, gastric cancer, colorectal cancer, lung cancer, or other solid tumors.

[1093] In one aspect, the present invention provides methods of treating cancer by providing to the subject in need thereof an LSD1 inhibitor and immune effector cells (e.g., T cells, NK cells) that are engineered to express a MUC1CAR, wherein the cancer cells express MUC1. In one embodiment, the cancer to be treated is breast cancer, lung cancer, or other solid tumors.

[1094] In one aspect, the present invention provides methods of treating cancer by providing to the subject in need thereof an LSD1 inhibitor and immune effector cells (e.g., T cells, NK cells) that are engineered to express a EGFRCAR, wherein the cancer cells express EGFR. In one embodiment, the cancer to be treated is glioblastoma, SCLC (small cell lung cancer), SCCHN (squamous cell carcinoma of the head and neck), NSCLC, or other solid tumors.

[1095] In one aspect, the present invention provides methods of treating cancer by providing to the subject in need thereof an LSD1 inhibitor and immune effector cells (e.g., T cells, NK cells) that are engineered to express a NCAMCAR, wherein the cancer cells express NCAM. In one embodiment, the cancer to be treated is neuroblastoma, or other solid tumors.

[1096] In one aspect, the present invention provides methods of treating cancer by providing to the subject in need thereof an LSD1 inhibitor and immune effector cells (e.g., T cells, NK cells) that are engineered to express a CAIXCAR, wherein the cancer cells express CAIX. In one embodiment, the cancer to be treated is renal cancer, CRC, cervical cancer, or other solid tumors.

[1097] In one aspect, the present invention provides methods of treating cancer by providing to the subject in need thereof an LSD1 inhibitor and immune effector cells (e.g., T cells, NK cells) that are engineered to express an EphA2CAR, wherein the cancer cells express EphA2. In one embodiment, the cancer to be treated is GBM.

[1098] In one aspect, the present invention provides methods of treating cancer by providing to the subject in need thereof an LSD1 inhibitor and immune effector cells (e.g., T cells, NK cells) that are engineered to express a GD3CAR, wherein the cancer cells express GD3. In one embodiment, the cancer to be treated is melanoma.

[1099] In one aspect, the present invention provides methods of treating cancer by providing to the subject in need thereof an LSD1 inhibitor and immune effector cells (e.g., T cells, NK cells) that are engineered to express a Fucosyl GM1CAR, wherein the cancer cells express Fucosyl GM In one aspect, the present invention provides methods of treating cancer by providing to the subject in need thereof an LSD1 inhibitor and immune effector cells (e.g., T cells, NK cells) that are engineered to express a sLeCAR, wherein the cancer cells express sLe. In one embodiment, the cancer to be treated is NSCLC, or AML.

[1100] In one aspect, the present invention provides methods of treating cancer by providing to the subject in need thereof an LSD1 inhibitor and immune effector cells (e.g., T cells, NK cells) that are engineered to express a GM3CAR, wherein the cancer cells express GM3.

[1101] In one aspect, the present invention provides methods of treating cancer by providing to the subject in need thereof an LSD1 inhibitor and immune effector cells (e.g., T cells, NK cells) that are engineered to express a TGS5CAR, wherein the cancer cells express TGS5.

[1102] In one aspect, the present invention provides methods of treating cancer by providing to the subject in need thereof an LSD1 inhibitor and immune effector cells (e.g., T cells, NK cells) that are engineered to express a HMWMAACAR, wherein the cancer cells express HMWMAA. In one embodiment, the cancer to be treated is melanoma, glioblastoma, or breast cancer.

[1103] In one aspect, the present invention provides methods of treating cancer by providing to the subject in need thereof an LSD1 inhibitor and immune effector cells (e.g., T cells, NK cells) that are engineered to express an o-acetyl-GD2CAR, wherein the cancer cells express o-acetyl-GD2. In one embodiment, the cancer to be treated is neuroblastoma, or melanoma.

[1104] In one aspect, the present invention provides methods of treating cancer by providing to the subject in need thereof an LSD1 inhibitor and immune effector cells (e.g., T cells, NK cells) that are engineered to express a Folate receptor betaCAR, wherein the cancer cells express CD19. In one embodiment, the cancer to be treated is AML, or myeloma.

[1105] In one aspect, the present invention provides methods of treating cancer by providing to the subject in need thereof an LSD1 inhibitor and immune effector cells (e.g., T cells, NK cells) that are engineered to express a TEM1/CD248CAR, wherein the cancer cells express TEM1/CD248. In one embodiment, the cancer to be treated is a solid tumor.

[1106] In one aspect, the present invention provides methods of treating cancer by providing to the subject in need thereof an LSD1 inhibitor and immune effector cells (e.g., T cells, NK cells) that are engineered to express a TEM7RCAR, wherein the cancer cells express TEM7R. In one embodiment, the cancer to be treated is solid tumor.

[1107] In one aspect, the present invention provides methods of treating cancer by providing to the subject in need thereof an LSD1 inhibitor and immune effector cells (e.g., T cells, NK cells) that are engineered to express a CLDN6CAR, wherein the cancer cells express CLDN6. In one embodiment, the cancer to be treated is ovarian cancer, lung cancer, or breast cancer.

[1108] In one aspect, the present invention provides methods of treating cancer by providing to the subject in need thereof an LSD1 inhibitor and immune effector cells (e.g., T cells, NK cells) that are engineered to express a TSHRCAR, wherein the cancer cells express TSHR. In one embodiment, the cancer to be treated is thyroid cancer, or multiple myeloma.

[1109] In one aspect, the present invention provides methods of treating cancer by providing to the subject in need thereof an LSD1 inhibitor and immune effector cells (e.g., T cells, NK cells) that are engineered to express a GPRC5DCAR, wherein the cancer cells express GPRC5D. In one embodiment, the cancer to be treated is multiple myeloma.

[1110] In one aspect, the present invention provides methods of treating cancer by providing to the subject in need thereof an LSD1 inhibitor and immune effector cells (e.g., T cells, NK cells) that are engineered to express a CXORF61CAR, wherein the cancer cells express CXORF61.

[1111] In one aspect, the present invention provides methods of treating cancer by providing to the subject in need thereof an LSD1 inhibitor and immune effector cells (e.g., T cells, NK cells) that are engineered to express a CD97CAR, wherein the cancer cells express CD97. In one embodiment, the cancer to be treated is B cell malignancies, gastric cancer, pancreatic cancer, esophageal cancer, glioblastoma, breast cancer, or colorectal cancer.

[1112] In one aspect, the present invention provides methods of treating cancer by providing to the subject in need thereof an LSD1 inhibitor and immune effector cells (e.g., T cells, NK cells) that are engineered to express a CD179aCAR, wherein the cancer cells express CD179a. In one embodiment, the cancer to be treated is B cell malignancies.

[1113] In one aspect, the present invention provides methods of treating cancer by providing to the subject in need thereof an LSD1 inhibitor and immune effector cells (e.g., T cells, NK cells) that are engineered to express an ALK CAR, wherein the cancer cells express ALK. In one embodiment, the cancer to be treated is NSCLC, ALCL (anaplastic large cell lymphoma), IMT (inflammatory myofibroblastic tumor), or neuroblastoma.

[1114] In one aspect, the present invention provides methods of treating cancer by providing to the subject in need thereof an LSD1 inhibitor and immune effector cells (e.g., T cells, NK cells) that are engineered to express a Plysialic acid CAR, wherein the cancer cells express Plysialic acid. In one embodiment, the cancer to be treated is small cell lung cancer.

[1115] In one aspect, the present invention provides methods of treating cancer by providing to the subject in need thereof an LSD1 inhibitor and immune effector cells (e.g., T cells, NK cells) that are engineered to express a PLACICAR, wherein the cancer cells express PLAC1. In one embodiment, the cancer to be treated is HCC (hepatocellular carcinoma).

[1116] In one aspect, the present invention provides methods of treating cancer by providing to the subject in need thereof an LSD1 inhibitor and immune effector cells (e.g., T cells, NK cells) that are engineered to express a GloboHCAR, wherein the cancer cells express GloboH. In one embodiment, the cancer to be treated is ovarian cancer, gastric cancer, prostate cancer, lung cancer, breast cancer, or pancreatic cancer.

[1117] In one aspect, the present invention provides methods of treating cancer by providing to the subject in need thereof an LSD1 inhibitor and immune effector cells (e.g., T cells, NK cells) that are engineered to express a NY-BR-1CAR, wherein the cancer cells express NY-BR-1. In one embodiment, the cancer to be treated is breast cancer.

[1118] In one aspect, the present invention provides methods of treating cancer by providing to the subject in need thereof an LSD1 inhibitor and immune effector cells (e.g., T cells, NK cells) that are engineered to express a UPK2CAR, wherein the cancer cells express UPK2. In one embodiment, the cancer to be treated is bladder cancer.

[1119] In one aspect, the present invention provides methods of treating cancer by providing to the subject in need thereof an LSD1 inhibitor and immune effector cells (e.g., T cells, NK cells) that are engineered to express a HAVCR1CAR, wherein the cancer cells express HAVCR1. In one embodiment, the cancer to be treated is renal cancer.

[1120] In one aspect, the present invention provides methods of treating cancer by providing to the subject in need thereof an LSD1 inhibitor and immune effector cells (e.g., T cells, NK cells) that are engineered to express a ADRB3CAR, wherein the cancer cells express ADRB3. In one embodiment, the cancer to be treated is Ewing sarcoma.

[1121] In one aspect, the present invention provides methods of treating cancer by providing to the subject in need thereof an LSD1 inhibitor and immune effector cells (e.g., T cells, NK cells) that are engineered to express a PANX3CAR, wherein the cancer cells express PANX3. In one embodiment, the cancer to be treated is osteosarcoma.

[1122] In one aspect, the present invention provides methods of treating cancer by providing to the subject in need thereof an LSD1 inhibitor and immune effector cells (e.g., T cells, NK cells) that are engineered to express a GPR20CAR, wherein the cancer cells express GPR20. In one embodiment, the cancer to be treated is GIST.

[1123] In one aspect, the present invention provides methods of treating cancer by providing to the subject in need thereof an LSD1 inhibitor and immune effector cells (e.g., T cells, NK cells) that are engineered to express a LY6KCAR, wherein the cancer cells express LY6K. In one embodiment, the cancer to be treated is breast cancer, lung cancer, ovary caner, or cervix cancer.

[1124] In one aspect, the present invention provides methods of treating cancer by providing to the subject in need thereof an LSD1 inhibitor and immune effector cells (e.g., T cells, NK cells) that are engineered to express a OR51E2CAR, wherein the cancer cells express OR51E2. In one embodiment, the cancer to be treated is prostate cancer.

[1125] In one aspect, the present invention provides methods of treating cancer by providing to the subject in need thereof an LSD1 inhibitor and immune effector cells (e.g., T cells, NK cells) that are engineered to express a TARPCAR, wherein the cancer cells express TARP. In one embodiment, the cancer to be treated is prostate cancer.

[1126] In one aspect, the present invention provides methods of treating cancer by providing to the subject in need thereof an LSD1 inhibitor and immune effector cells (e.g., T cells, NK cells) that are engineered to express a WT1CAR, wherein the cancer cells express WT1.

[1127] In one aspect, the present invention provides methods of treating cancer by providing to the subject in need thereof an LSD1 inhibitor and immune effector cells (e.g., T cells, NK cells) that are engineered to express a NY-ESO-ICAR, wherein the cancer cells express NY-ESO-1.

[1128] In one aspect, the present invention provides methods of treating cancer by providing to the subject in need thereof an LSD1 inhibitor and immune effector cells (e.g., T cells, NK cells) that are engineered to express a LAGE-la CAR, wherein the cancer cells express LAGE-la.

[1129] In one aspect, the present invention provides methods of treating cancer by providing to the subject in need thereof an LSD1 inhibitor and immune effector cells (e.g., T cells, NK cells) that are engineered to express a MAGE-A1CAR, wherein the cancer cells express MAGE-A1. In one embodiment, the cancer to be treated is melanoma.

[1130] In one aspect, the present invention provides methods of treating cancer by providing to the subject in need thereof an LSD1 inhibitor and immune effector cells (e.g., T cells, NK cells) that are engineered to express a MAGE A1CAR, wherein the cancer cells express MAGE A1.

[1131] In one aspect, the present invention provides methods of treating cancer by providing to the subject in need thereof an LSD1 inhibitor and immune effector cells (e.g., T cells, NK cells) that are engineered to express a ETV6-AML CAR, wherein the cancer cells express ETV6-AML.

[1132] In one aspect, the present invention provides methods of treating cancer by providing to the subject in need thereof an LSD1 inhibitor and immune effector cells (e.g., T cells, NK cells) that are engineered to express a sperm protein 17 CAR, wherein the cancer cells express sperm protein 17. In one embodiment, the cancer to be treated is ovarian cancer, HCC, or NSCLC.

[1133] In one aspect, the present invention provides methods of treating cancer by providing to the subject in need thereof an LSD1 inhibitor and immune effector cells (e.g., T cells, NK cells) that are engineered to express a XAGE1CAR, wherein the cancer cells express XAGE1. In one embodiment, the cancer to be treated is Ewings, or rhabdo cancer.

[1134] In one aspect, the present invention provides methods of treating cancer by providing to the subject in need thereof an LSD1 inhibitor and immune effector cells (e.g., T cells, NK cells) that are engineered to express a Tie 2 CAR, wherein the cancer cells express Tie 2. In one embodiment, the cancer to be treated is a solid tumor.

[1135] In one aspect, the present invention provides methods of treating cancer by providing to the subject in need thereof an LSD1 inhibitor and immune effector cells (e.g., T cells, NK cells) that are engineered to express a MAD-CT-1CAR, wherein the cancer cells express MAD-CT-1. In one embodiment, the cancer to be treated is prostate cancer, or melanoma.

[1136] In one aspect, the present invention provides methods of treating cancer by providing to the subject in need thereof an LSD1 inhibitor and immune effector cells (e.g., T cells, NK cells) that are engineered to express a MAD-CT-2CAR, wherein the cancer cells express MAD-CT-2. In one embodiment, the cancer to be treated is prostate cancer, melanoma.

[1137] In one aspect, the present invention provides methods of treating cancer by providing to the subject in need thereof an LSD1 inhibitor and immune effector cells (e.g., T cells, NK cells) that are engineered to express a Fos-related antigen 1 CAR, wherein the cancer cells express Fos-related antigen 1. In one embodiment, the cancer to be treated is glioma, squamous cell cancer, or pancreatic cancer.

[1138] In one aspect, the present invention provides methods of treating cancer by providing to the subject in need thereof an LSD1 inhibitor and immune effector cells (e.g., T cells, NK cells) that are engineered to express a p53CAR, wherein the cancer cells express p53.

[1139] In one aspect, the present invention provides methods of treating cancer by providing to the subject in need thereof an LSD1 inhibitor and immune effector cells (e.g., T cells, NK cells) that are engineered to express a prostein CAR, wherein the cancer cells express prostein.

[1140] In one aspect, the present invention provides methods of treating cancer by providing to the subject in need thereof an LSD1 inhibitor and immune effector cells (e.g., T cells, NK cells) that are engineered to express a survivin and telomerase CAR, wherein the cancer cells express survivin and telomerase.

[1141] In one aspect, the present invention provides methods of treating cancer by providing to the subject in need thereof an LSD1 inhibitor and immune effector cells (e.g., T cells, NK cells) that are engineered to express a PCTA-1/Galectin 8 CAR, wherein the cancer cells express PCTA-1/Galectin 8.

[1142] In one aspect, the present invention provides methods of treating cancer by providing to the subject in need thereof an LSD1 inhibitor and immune effector cells (e.g., T cells, NK cells) that are engineered to express a MelanA/MART1CAR, wherein the cancer cells express MelanA/MART1.

[1143] In one aspect, the present invention provides methods of treating cancer by providing to the subject in need thereof an LSD1 inhibitor and immune effector cells (e.g., T cells, NK cells) that are engineered to express a Ras mutant CAR, wherein the cancer cells express Ras mutant.

[1144] In one aspect, the present invention provides methods of treating cancer by providing to the subject in need thereof an LSD1 inhibitor and immune effector cells (e.g., T cells, NK cells) that are engineered to express a p53 mutant CAR, wherein the cancer cells express p53 mutant.

[1145] In one aspect, the present invention provides methods of treating cancer by providing to the subject in need thereof an LSD1 inhibitor and immune effector cells (e.g., T cells, NK cells) that are engineered to express a hTERT CAR, wherein the cancer cells express hTERT.

[1146] In one aspect, the present invention provides methods of treating cancer by providing to the subject in need thereof an LSD1 inhibitor and immune effector cells (e.g., T cells, NK cells) that are engineered to express a sarcoma translocation breakpoints CAR, wherein the cancer cells express sarcoma translocation breakpoints. In one embodiment, the cancer to be treated is sarcoma.

[1147] In one aspect, the present invention provides methods of treating cancer by providing to the subject in need thereof an LSD1 inhibitor and immune effector cells (e.g., T cells, NK cells) that are engineered to express a ML-IAP CAR, wherein the cancer cells express ML-IAP. In one embodiment, the cancer to be treated is melanoma.

[1148] In one aspect, the present invention provides methods of treating cancer by providing to the subject in need thereof an LSD1 inhibitor and immune effector cells (e.g., T cells, NK cells) that are engineered to express a ERGCAR, wherein the cancer cells express ERG (TMPRSS2 ETS fusion gene).

[1149] In one aspect, the present invention provides methods of treating cancer by providing to the subject in need thereof an LSD1 inhibitor and immune effector cells (e.g., T cells, NK cells) that are engineered to express a NA17CAR, wherein the cancer cells express NA17. In one embodiment, the cancer to be treated is melanoma.

[1150] In one aspect, the present invention provides methods of treating cancer by providing to the subject in need thereof an LSD1 inhibitor and immune effector cells (e.g., T cells, NK cells) that are engineered to express a PAX3CAR, wherein the cancer cells express PAX3. In one embodiment, the cancer to be treated is alveolar rhabdomyosarcoma.

[1151] In one aspect, the present invention provides methods of treating cancer by providing to the subject in need thereof an LSD1 inhibitor and immune effector cells (e.g., T cells, NK cells) that are engineered to express an androgen receptor CAR, wherein the cancer cells express androgen receptor. In one embodiment, the cancer to be treated is metastatic prostate cancer.

[1152] In one aspect, the present invention provides methods of treating cancer by providing to the subject in need thereof an LSD1 inhibitor and immune effector cells (e.g., T cells, NK cells) that are engineered to express a Cyclin B1CAR, wherein the cancer cells express Cyclin B1.

[1153] In one aspect, the present invention provides methods of treating cancer by providing to the subject in need thereof an LSD1 inhibitor and immune effector cells (e.g., T cells, NK cells) that are engineered to express a MYCNCAR, wherein the cancer cells express MYCN.

[1154] In one aspect, the present invention provides methods of treating cancer by providing to the subject in need thereof an LSD1 inhibitor and immune effector cells (e.g., T cells, NK cells) that are engineered to express a RhoC CAR, wherein the cancer cells express RhoC.

[1155] In one aspect, the present invention provides methods of treating cancer by providing to the subject in need thereof an LSD1 inhibitor and immune effector cells (e.g., T cells, NK cells) that are engineered to express a TRP-2CAR, wherein the cancer cells express TRP-2. In one embodiment, the cancer to be treated is melanoma.

[1156] In one aspect, the present invention provides methods of treating cancer by providing to the subject in need thereof an LSD1 inhibitor and immune effector cells (e.g., T cells, NK cells) that are engineered to express a CYP1B1CAR, wherein the cancer cells express CYP1B1. In one embodiment, the cancer to be treated is breast cancer, colon cancer, lung cancer, esophagus cancer, skin cancer, lymph node cancer, brain cancer, or testis cancer.

[1157] In one aspect, the present invention provides methods of treating cancer by providing to the subject in need thereof an LSD1 inhibitor and immune effector cells (e.g., T cells, NK cells) that are engineered to express a BORIS CAR, wherein the cancer cells express BORIS. In one embodiment, the cancer to be treated is lung cancer.

[1158] In one aspect, the present invention provides methods of treating cancer by providing to the subject in need thereof an LSD1 inhibitor and immune effector cells (e.g., T cells, NK cells) that are engineered to express a SART3CAR, wherein the cancer cells express SART3 In one aspect, the present invention provides methods of treating cancer by providing to the subject in need thereof an LSD1 inhibitor and immune effector cells (e.g., T cells, NK cells) that are engineered to express a PAX5CAR, wherein the cancer cells express PAX5.

[1159] In one aspect, the present invention provides methods of treating cancer by providing to the subject in need thereof an LSD1 inhibitor and immune effector cells (e.g., T cells, NK cells) that are engineered to express a OY-TES1CAR, wherein the cancer cells express OY-TES1.

[1160] In one aspect, the present invention provides methods of treating cancer by providing to the subject in need thereof an LSD1 inhibitor and immune effector cells (e.g., T cells, NK cells) that are engineered to express a LCK CAR, wherein the cancer cells express LCK.

[1161] In one aspect, the present invention provides methods of treating cancer by providing to the subject in need thereof an LSD1 inhibitor and immune effector cells (e.g., T cells, NK cells) that are engineered to express a AKAP-4CAR, wherein the cancer cells express AKAP-4.

[1162] In one aspect, the present invention provides methods of treating cancer by providing to the subject in need thereof an LSD1 inhibitor and immune effector cells (e.g., T cells, NK cells) that are engineered to express a SSX2CAR, wherein the cancer cells express SSX2.

[1163] In one aspect, the present invention provides methods of treating cancer by providing to the subject in need thereof an LSD1 inhibitor and immune effector cells (e.g., T cells, NK cells) that are engineered to express a RAGE-1CAR, wherein the cancer cells express RAGE-1. In one embodiment, the cancer to be treated is RCC (renal cell cancer), or other solid tumors

[1164] In one aspect, the present invention provides methods of treating cancer by providing to the subject in need thereof an LSD1 inhibitor and immune effector cells (e.g., T cells, NK cells) that are engineered to express a human telomerase reverse transcriptase CAR, wherein the cancer cells express human telomerase reverse transcriptase. In one embodiment, the cancer to be treated is solid tumors.

[1165] In one aspect, the present invention provides methods of treating cancer by providing to the subject in need thereof an LSD1 inhibitor and immune effector cells (e.g., T cells, NK cells) that are engineered to express a RU1CAR, wherein the cancer cells express RU1.

[1166] In one aspect, the present invention provides methods of treating cancer by providing to the subject in need thereof an LSD1 inhibitor and immune effector cells (e.g., T cells, NK cells) that are engineered to express a RU2CAR, wherein the cancer cells express RU2.

[1167] In one aspect, the present invention provides methods of treating cancer by providing to the subject in need thereof an LSD1 inhibitor and immune effector cells (e.g., T cells, NK cells) that are engineered to express an intestinal carboxyl esteraseCAR, wherein the cancer cells express intestinal carboxyl esterase. In one embodiment, the cancer to be treated is thyroid cancer, RCC, CRC (colorectal cancer), breast cancer, or other solid tumors.

[1168] In one aspect, the present invention provides methods of treating cancer by providing to the subject in need thereof an LSD1 inhibitor and immune effector cells (e.g., T cells, NK cells) that are engineered to express a Prostase CAR, wherein the cancer cells express Prostase.

[1169] In one aspect, the present invention provides methods of treating cancer by providing to the subject in need thereof an LSD1 inhibitor and immune effector cells (e.g., T cells, NK cells) that are engineered to express a PAPCAR, wherein the cancer cells express PAP.

[1170] In one aspect, the present invention provides methods of treating cancer by providing to the subject in need thereof an LSD1 inhibitor and immune effector cells (e.g., T cells, NK cells) that are engineered to express an IGF-I receptor CAR, wherein the cancer cells express IGF-I receptor.

[1171] In one aspect, the present invention provides methods of treating cancer by providing to the subject in need thereof an LSD1 inhibitor and immune effector cells (e.g., T cells, NK cells) that are engineered to express a gp100 CAR, wherein the cancer cells express gp100.

[1172] In one aspect, the present invention provides methods of treating cancer by providing to the subject in need thereof an LSD1 inhibitor and immune effector cells (e.g., T cells, NK cells) that are engineered to express a bcr-abl CAR, wherein the cancer cells express bcr-abl.

[1173] In one aspect, the present invention provides methods of treating cancer by providing to the subject in need thereof an LSD1 inhibitor and immune effector cells (e.g., T cells, NK cells) that are engineered to express a tyrosinase CAR, wherein the cancer cells express tyrosinase.

[1174] In one aspect, the present invention provides methods of treating cancer by providing to the subject in need thereof immune effector cells (e.g., T cells, NK cells) that are engineered to express a Fucosyl GM1CAR, wherein the cancer cells express Fucosyl GM1.

[1175] In one aspect, the present invention provides methods of treating cancer by providing to the subject in need thereof an LSD1 inhibitor and immune effector cells (e.g., T cells, NK cells) that are engineered to express a mut hsp70-2CAR, wherein the cancer cells express mut hsp70-2. In one embodiment, the cancer to be treated is melanoma.

[1176] In one aspect, the present invention provides methods of treating cancer by providing to the subject in need thereof immune effector cells (e.g., T cells, NK cells) that are engineered to express a CD79a CAR, wherein the cancer cells express CD79a.

[1177] In one aspect, the present invention provides methods of treating cancer by providing to the subject in need thereof immune effector cells (e.g., T cells, NK cells) that are engineered to express a CD79b CAR, wherein the cancer cells express CD79b.

[1178] In one aspect, the present invention provides methods of treating cancer by providing to the subject in need thereof immune effector cells (e.g., T cells, NK cells) that are engineered to express a CD72 CAR, wherein the cancer cells express CD72.

[1179] In one aspect, the present invention provides methods of treating cancer by providing to the subject in need thereof immune effector cells (e.g., T cells, NK cells) that are engineered to express a LAIR1 CAR, wherein the cancer cells express LAIR1.

[1180] In one aspect, the present invention provides methods of treating cancer by providing to the subject in need thereof immune effector cells (e.g., T cells, NK cells) that are engineered to express a FCAR CAR, wherein the cancer cells express FCAR.

[1181] In one aspect, the present invention provides methods of treating cancer by providing to the subject in need thereof immune effector cells (e.g., T cells, NK cells) that are engineered to express a LILRA2 CAR, wherein the cancer cells express LILRA2.

[1182] In one aspect, the present invention provides methods of treating cancer by providing to the subject in need thereof immune effector cells (e.g., T cells, NK cells) that are engineered to express a CD300LF CAR, wherein the cancer cells express CD300LF.

[1183] In one aspect, the present invention provides methods of treating cancer by providing to the subject in need thereof immune effector cells (e.g., T cells, NK cells) that are engineered to express a CLEC12A CAR, wherein the cancer cells express CLEC12A.

[1184] In one aspect, the present invention provides methods of treating cancer by providing to the subject in need thereof immune effector cells (e.g., T cells, NK cells) that are engineered to express a BST2 CAR, wherein the cancer cells express BST2.

[1185] In one aspect, the present invention provides methods of treating cancer by providing to the subject in need thereof immune effector cells (e.g., T cells, NK cells) that are engineered to express an EMR2 CAR, wherein the cancer cells express EMR2.

[1186] In one aspect, the present invention provides methods of treating cancer by providing to the subject in need thereof immune effector cells (e.g., T cells, NK cells) that are engineered to express a LY75 CAR, wherein the cancer cells express LY75.

[1187] In one aspect, the present invention provides methods of treating cancer by providing to the subject in need thereof immune effector cells (e.g., T cells, NK cells) that are engineered to express a GPC3 CAR, wherein the cancer cells express GPC3.

[1188] In one aspect, the present invention provides methods of treating cancer by providing to the subject in need thereof immune effector cells (e.g., T cells, NK cells) that are engineered to express a FCRL5 CAR, wherein the cancer cells express FCRL5.

[1189] In one aspect, the present invention provides methods of treating cancer by providing to the subject in need thereof immune effector cells (e.g., T cells, NK cells) that are engineered to express an IGLL1 CAR, wherein the cancer cells express IGLL1.

[1190] In one aspect, the present invention relates to treating a subject in vivo using an LSD1 inhibitor and a PD1 CAR such that growth of cancerous tumors is inhibited. A PD1 CAR may be used alone to inhibit the growth of cancerous tumors. Alternatively, PD1 CAR may be used in conjunction with other CARs, immunogenic agents, standard cancer treatments, or other antibodies. In one embodiment, the subject is treated with a PD1 CAR and an XCAR described herein. In an embodiment, a PD1 CAR is used in conjunction with another CAR, e.g., a CAR described herein, and a kinase inhibitor, e.g., a kinase inhibitor described herein.

[1191] In another aspect, a method of treating a subject, e.g., reducing or ameliorating, a hyperproliferative condition or disorder (e.g., a cancer), e.g., a solid tumor, a soft tissue tumor, a hematological cancer, or a metastatic lesion, in a subject, is provided. In embodiments the method comprises administration of an LSD1 inhibitor and a population of immune effector cells, e.g., T cells, engineered to express a CAR.

[1192] In yet another aspect, the invention features a method of treating a subject having a disease associated with expression of a tumor antigen (e.g., an antigen described herein), comprising administering to the subject an effective amount of a cell, e.g., an immune effector cell (e.g., a population of immune effector cells) comprising a CAR molecule, wherein the CAR molecule comprises an antigen binding domain, a transmembrane domain, and an intracellular domain, said intracellular domain comprises a costimulatory domain and/or a primary signaling domain, wherein said antigen binding domain binds to the tumor antigen associated with the disease, e.g. a tumor antigen as described herein.

[1193] In a related aspect, the invention features a method of treating a subject having a disease associated with expression of a tumor antigen. The method comprises administering to the subject an effective amount of a cell, e.g., an immune effector cell (e.g., a population of immune effector cells) comprising a CAR molecule, in combination (in addition to the LSD1 inhibitor) with an agent that increases the efficacy of the immune cell, wherein:
[1194] the agent that increases the efficacy of the immune cell is chosen from one or more of
[1195] (i) a protein phosphatase inhibitor;
[1196] (ii) a kinase inhibitor;
[1197] (iii) a cytokine;
[1198] (iv) an inhibitor of an immune inhibitory molecule; or
[1199] (v) an agent that decreases the level or activity of a T_{REG} cell.

[1200] In another aspect, the invention features a composition comprising an immune effector cell (e.g., a population of immune effector cells) comprising a CAR molecule (e.g., a CAR molecule as described herein) for use in treating a subject having a disease associated with expression of a tumor antigen, e.g., a disorder as described herein.

[1201] In certain embodiments of any of the aforesaid methods or uses, the disease associated with a tumor antigen, e.g., a tumor antigen described herein, is selected from a proliferative disease such as a cancer or malignancy or a precancerous condition such as a myelodysplasia, a myelodysplastic syndrome or a preleukemia, or is a non-cancer related indication associated with expression of a tumor antigen described herein. In one embodiment, the disease is a cancer described herein, e.g., a cancer described herein as being associated with a target described herein. In one embodiment, the disease is a hematologic cancer. In one embodiment, the hematologic cancer is leukemia. In one embodiment, the cancer is selected from the group consisting of one or more acute leukemias including but not limited to B-cell acute lymphoid leukemia (“BALL”), T-cell acute lymphoid leukemia (“TALL”), acute lymphoid leukemia (ALL); one or more chronic leukemias including but not limited to chronic myelogenous leukemia (CML), chronic lymphocytic leukemia (CLL); additional hematologic cancers or hematologic conditions including, but not limited to B cell prolymphocytic leukemia, blastic plasmacytoid dendritic cell neoplasm, Burkitt's lymphoma, diffuse large B cell lymphoma, follicular lymphoma, hairy cell leukemia, small cell- or a large cell-follicular lymphoma, malignant lymphoproliferative conditions, MALT lymphoma, mantle cell lymphoma, Marginal zone lymphoma, multiple myeloma, myelodysplasia and myelodysplastic syndrome, non-Hodgkin lymphoma, Hodgkin lymphoma, plasmablastic lymphoma, plasmacytoid dendritic cell neoplasm, Waldenstrom macroglobulinemia, and “preleukemia” which are a diverse collection of hematological conditions united by ineffective production (or dysplasia) of myeloid blood cells, and to disease associated with expression of a tumor antigen described herein include, but not limited to, atypical and/or non-classical cancers, malignancies, precancerous conditions or proliferative diseases expressing a tumor antigen as described herein; and any combination thereof. In another embodiment, the disease associated with a tumor antigen described herein is a solid tumor.

[1202] In certain embodiments, the methods or uses are carried out in combination with an agent that increases the efficacy of the immune effector cell, e.g., an agent as described herein.

[1203] In any of the aforesaid methods or uses, the disease associated with expression of the tumor antigen is selected from the group consisting of a proliferative disease, a precancerous condition, a cancer, and a non-cancer related indication associated with expression of the tumor antigen.

[1204] The cancer can be a hematologic cancer, e.g., a cancer chosen from one or more of chronic lymphocytic leukemia (CLL), acute leukemias, acute lymphoid leukemia (ALL), acute myeloid leukemia (AML), B-cell acute lymphoid leukemia (B-ALL), T-cell acute lymphoid leukemia (T-ALL), chronic myelogenous leukemia (CML), B cell prolymphocytic leukemia, blastic plasmacytoid dendritic cell neoplasm, Burkitt's lymphoma, diffuse large B cell lymphoma, follicular lymphoma, hairy cell leukemia, small cell- or a large cell-follicular lymphoma, malignant lymphoproliferative conditions, MALT lymphoma, mantle cell lymphoma, marginal zone lymphoma, multiple myeloma, myelodysplasia and myelodysplastic syndrome, non-Hodgkin's lymphoma, Hodgkin's lymphoma, plasmablastic lymphoma, plasmacytoid dendritic cell neoplasm, Waldenstrom macroglobulinemia, or pre-leukemia.

[1205] The cancer can also be chosen from colon cancer, rectal cancer, renal-cell carcinoma, liver cancer, non-small cell carcinoma of the lung, cancer of the small intestine, cancer of the esophagus, melanoma, bone cancer, pancreatic cancer, skin cancer, cancer of the head or neck, cutaneous or intraocular malignant melanoma, uterine cancer, ovarian cancer, rectal cancer, cancer of the anal region, stomach cancer, testicular cancer, uterine cancer, carcinoma of the fallopian tubes, carcinoma of the endometrium, carcinoma of the cervix, carcinoma of the vagina, carcinoma of the vulva, Hodgkin's Disease, non-Hodgkin's lymphoma, cancer of the endocrine system, cancer of the thyroid gland, cancer of the parathyroid gland, cancer of the adrenal gland, sarcoma of soft tissue, cancer of the urethra, cancer of the penis, solid tumors of childhood, cancer of the bladder, cancer of the kidney or ureter, carcinoma of the renal pelvis, neoplasm of the central nervous system (CNS), primary CNS lymphoma, tumor angiogenesis, spinal axis tumor, brain stem glioma, pituitary adenoma, Kaposi's sarcoma, epidermoid cancer, squamous cell cancer, T-cell lymphoma, environmentally induced cancers, combinations of said cancers, and metastatic lesions of said cancers.

[1206] In certain embodiments of the methods or uses described herein, the CAR molecule is administered in combination with an agent that increases the efficacy of the immune effector cell (in addition to the LSD1 inhibitor), e.g., one or more of a protein phosphatase inhibitor, a kinase inhibitor, a cytokine, an inhibitor of an immune inhibitory molecule; or an agent that decreases the level or activity of a T_{REG} cell.

[1207] In certain embodiments of the methods or uses described herein, the protein phosphatase inhibitor is a SHP-1 inhibitor and/or an SHP-2 inhibitor.

[1208] In other embodiments of the methods or uses described herein, kinase inhibitor is chosen from one or more of a CDK4 inhibitor, a CDK4/6 inhibitor (e.g., palbociclib), a BTK inhibitor (e.g., ibrutinib or RN-486), an mTOR inhibitor (e.g., rapamycin or everolimus (RAD001)), an MNK inhibitor, or a dual P13K/mTOR inhibitor. In one embodiment, the BTK inhibitor does not reduce or inhibit the kinase activity of interleukin-2-inducible kinase (ITK).

[1209] In other embodiments of the methods or uses described herein, the agent that inhibits the immune inhibitory molecule comprises an antibody or antibody fragment, an inhibitory nucleic acid, a clustered regularly interspaced short palindromic repeats (CRISPR), a transcription-activator like effector nuclease (TALEN), or a zinc finger endonuclease (ZFN) that inhibits the expression of the inhibitory molecule.

[1210] In other embodiments of the methods or uses described herein, the agent that decreases the level or activity of the TREG cells is chosen from cyclophosphamide, anti-GITR antibody, CD25-depletion, or a combination thereof.

[1211] In certain embodiments of the methods or uses described herein, the immune inhibitory molecule is selected from the group consisting of PD1, PD-L1, CTLA-4, TIM-3, LAG-3, VISTA, BTLA, TIGIT, LAIR1, CD160, 2B4, TGF beta, CEACAM-1, CEACAM-3, and CEACAM-5.

[1212] In other embodiments, the agent that inhibits the inhibitory molecule comprises a first polypeptide comprising an inhibitory molecule or a fragment thereof and a second polypeptide that provides a positive signal to the cell, and wherein the first and second polypeptides are expressed on the CAR-containing immune cells, wherein (i) the first polypeptide comprises PD1, PD-L1, CTLA-4, TIM-3, LAG3, VISTA, BTLA, TIGIT, LAIR1, CD160, 2B4, TGF beta, CEACAM-1, CEACAM-3, and CEACAM-5 or a fragment thereof; and/or (ii) the second polypeptide comprises an intracellular signaling domain comprising a primary signaling domain and/or a costimulatory signaling domain. In one embodiment, the primary signaling domain comprises a functional domain of CD3 zeta; and/or the costimulatory signaling domain comprises a functional domain of a protein selected from 41BB, CD27 and CD28.

[1213] In other embodiments, cytokine is chosen from IL-7, IL-15 or IL-21, or combinations thereof.

[1214] In other embodiments, the immune effector cell comprising the CAR molecule and a second, e.g., any of the combination therapies disclosed herein (e.g., the agent that that increases the efficacy of the immune effector cell) are administered substantially simultaneously or sequentially.

[1215] In other embodiments, the immune cell comprising the CAR molecule is administered in combination with a molecule that targets GITR and/or modulates GITR function. In certain embodiments, the molecule targeting GITR and/or modulating GITR function is administered prior to the CAR-expressing cell or population of cells, or prior to apheresis.

[1216] In one embodiment, lymphocyte infusion, for example allogeneic lymphocyte infusion, is used in the treatment of the cancer, wherein the lymphocyte infusion comprises at least one CAR-expressing cell of the present invention. In one embodiment, autologous lymphocyte infusion is used in the treatment of the cancer, wherein the autologous lymphocyte infusion comprises at least one CAR-expressing cell described herein.

[1217] In one embodiment, the cell is a T cell and the T cell is diaglycerol kinase (DGK) deficient. In one embodiment, the cell is a T cell and the T cell is Ikaros deficient. In one embodiment, the cell is a T cell and the T cell is both DGK and Ikaros deficient.

[1218] In one embodiment, the method includes administering a cell expressing the CAR molecule, as described herein, in combination with an agent which enhances the activity of a CAR-expressing cell, wherein the agent is a cytokine, e.g., IL-7, IL-15, IL-18, IL-21, or a combination thereof. The cytokine can be delivered in combination with, e.g., simultaneously or shortly after, administration of the CAR-expressing cell. Alternatively, the cytokine can be delivered after a prolonged period of time after administration of the CAR-expressing cell, e.g., after assessment of the subject's response to the CAR-expressing cell. In one embodiment the cytokine is administered to the subject simultaneously (e.g., administered on the same day) with or shortly after administration (e.g., administered 1 day, 2 days, 3 days, 4 days, 5 days, 6 days, or 7 days after administration) of the cell or population of cells of any of claims 61-80. In other embodiments, the cytokine is administered to the subject after a prolonged period of time (e.g., e.g., at least 2 weeks, 3 weeks, 4 weeks, 6 weeks, 8 weeks, 10 weeks, or more) after administration of the cell or population of cells of any of claims 61-80, or after assessment of the subject's response to the cell.

[1219] In other embodiments, the cells expressing a CAR molecule are administered in combination with an agent that ameliorates one or more side effects associated with administration of a cell expressing a CAR molecule. Side effects associated with the CAR-expressing cell can be chosen from cytokine release syndrome (CRS) or hemophagocytic lymphohistiocytosis (HLH).

[1220] In embodiments of any of the aforeseaid methods or uses, the cells expressing the CAR molecule are administered in combination with an agent that treats the disease associated with expression of the tumor antigen, e.g., any of the second or third therapies disclosed herein. Additional exemplary combinations include one or more of the following.

[1221] In another embodiment, the cell expressing the CAR molecule, e.g., as described herein, can be administered in combination with another agent, e.g., a kinase inhibitor and/or checkpoint inhibitor described herein. In an embodiment, a cell expressing the CAR molecule can further express another agent, e.g., an agent which enhances the activity of a CAR-expressing cell.

[1222] For example, in one embodiment, the agent that enhances the activity of a CAR-expressing cell can be an agent which inhibits an inhibitory molecule (e.g., an immune inhibitor molecule). Examples of inhibitory molecules include PD1, PD-L1, CTLA-4, TIM-3, CEACAM (e.g., CEACAM-1, CEACAM-3 and/or CEACAM-5), LAG-3, VISTA, BTLA, TIGIT, LAIR1, CD160, 2B4 and TGF beta.

[1223] In one embodiment, the agent that inhibits the inhibitory molecule is an inhibitory nucleic acid is a dsRNA, a siRNA, or a shRNA. In embodiments, the inhibitory nucleic acid is linked to the nucleic acid that encodes a component of the CAR molecule. For example, the inhibitory molecule can be expressed on the CAR-expressing cell.

[1224] In another embodiment, the agent which inhibits an inhibitory molecule, e.g., is a molecule described herein, e.g., an agent that comprises a first polypeptide, e.g., an inhibitory molecule, associated with a second polypeptide that provides a positive signal to the cell, e.g., an intracellular signaling domain described herein. In one embodiment, the agent comprises a first polypeptide, e.g., of an inhibitory molecule such as PD-1, PD-L1, CTLA-4, TIM-3, CEACAM (e.g., CEACAM-1, CEACAM-3 and/or CEACAM-5), LAG-3, VISTA, BTLA, TIGIT, LAIR1, CD160, 2B4 or TGF beta, or a fragment of any of these (e.g., at least a portion of the extracellular domain of any of these), and a second polypeptide which is an intracellular signaling domain described herein (e.g., comprising a costimulatory domain (e.g., 41BB, CD27 or CD28, e.g., as described herein) and/or a primary signaling domain (e.g., a CD3 zeta signaling domain described herein). In one embodiment, the agent comprises a first polypeptide of PD1 or a fragment thereof (e.g., at least a portion of the extracellular domain of PD1), and a second polypeptide of an intracellular signaling domain described herein (e.g., a CD28 signaling domain described herein and/or a CD3 zeta signaling domain described herein).

[1225] In one embodiment, the CAR-expressing immune effector cell of the present invention, e.g., T cell or NK cell, is administered to a subject that has received a previous stem cell transplantation, e.g., autologous stem cell transplantation.

[1226] In one embodiment, the CAR-expressing immune effector cell of the present invention, e.g., T cell or NK cells, is administered to a subject that has received a previous dose of melphalan.

[1227] In one embodiment, the cell expressing a CAR molecule, e.g., a CAR molecule described herein, is administered in combination with an agent that increases the efficacy of a cell expressing a CAR molecule, e.g., an agent described herein.

[1228] In one embodiment, the cells expressing a CAR molecule, e.g., a CAR molecule described herein, are administered in combination with an LSD1 inhibitor. While not wishing to be bound by theory, it is believed that treatment with an LSD1 inhibitor is accompanied by a decrease in PD-1 positive T cells or an increase in PD-1 negative cells. PD-1 positive T cells, but not PD-1 negative T cells, can be exhausted by engagement with cells which express a PD-1 ligand, e.g., PD-L1 or PD-L2.

[1229] In an embodiment this approach can be used to optimize the performance of CAR cells described herein in the subject. While not wishing to be bound by theory, it is believed that, in an embodiment, the performance of endogenous, non-modified immune effector cells, e.g., T cells or NK cells, is improved. While not wishing to be bound by theory, it is believed that, in an embodiment, the performance of a target antigen CAR-expressing cell is improved. In other embodiments, cells, e.g., T cells or NK cells, which have, or will be engineered to express a CAR, can be treated ex vivo by contact with an amount of an LSD1 inhibitor that increases the number of PD1 negative immune effector cells, e.g., T cells or increases the ratio of PD1 negative immune effector cells, e.g., T cells/PD1 positive immune effector cells, e.g., T cells.

[1230] In an embodiment, administration of an LSD1 inhibitor is initiated prior to administration of an CAR expressing cell described herein, e.g., T cells or NK cells. In an embodiment, the CAR cells are administered after a sufficient time, or sufficient dosing, of an LSD1 inhibitor, such that the level of PD1 negative immune effector cells, e.g., T cells or NK cells, or the ratio of PD1 negative immune effector cells, e.g., T cells/PD1 positive immune effector cells, e.g., T cells, has been, at least transiently, increased.

[1231] In an embodiment, the cell, e.g., T cell or NK cell, to be engineered to express a CAR, is harvested after a sufficient time, or after sufficient dosing of the LSD1 inhibitor, such that the level of PD1 negative immune effector cells, e.g., T cells, or the ratio of PD1 negative immune effector cells, e.g., T cells/PD1 positive immune effector cells, e.g., T cells, in the subject or harvested from the subject has been, at least transiently, increased.

[1232] In one embodiment, the cell expressing a CAR molecule, e.g., a CAR molecule described herein, is administered in combination with an agent that ameliorates one or more side effect associated with administration of a cell expressing a CAR molecule, e.g., an agent described herein.

[1233] In one embodiment, the cell expressing a CAR molecule, e.g., a CAR molecule described herein, is administered in combination with an agent that treats the disease associated with a cancer associated antigen as described herein, e.g., an agent described herein.

[1234] In one embodiment, a cell expressing two or more CAR molecules, e.g., as described herein, is administered to a subject in need thereof to treat cancer. In one embodiment, a population of cells including a CAR expressing cell, e.g., as described herein, is administered to a subject in need thereof to treat cancer.

[1235] In one embodiment, the cell expressing a CAR molecule, e.g., a CAR molecule described herein, is administered at a dose and/or dosing schedule described herein.

[1236] In one embodiment, the CAR molecule is introduced into immune effector cells (e.g., T cells, NK cells), e.g., using in vitro transcription, and the subject (e.g., human) receives an initial administration of cells comprising a CAR molecule, and one or more subsequent administrations of cells comprising a CAR molecule, wherein the one or more subsequent administrations are administered less than 15 days, e.g., 14, 13, 12, 11, 10, 9, 8, 7, 6, 5, 4, 3, or 2 days after the previous administration. In one embodiment, more than one administration of cells comprising a CAR molecule are administered to the subject (e.g., human) per week, e.g., 2, 3, or 4 administrations of cells comprising a CAR molecule are administered per week. In one embodiment, the subject (e.g., human subject) receives more than one administration of cells comprising a CAR molecule per week (e.g., 2, 3 or 4 administrations per week) (also referred to herein as a cycle), followed by a week of no administration of cells comprising a CAR molecule, and then one or more additional administration of cells comprising a CAR molecule (e.g., more than one administration of the cells comprising a CAR molecule per week) is administered to the subject. In another embodiment, the subject (e.g., human subject) receives more than one cycle of cells comprising a CAR molecule, and the time between each cycle is less than 10, 9, 8, 7, 6, 5, 4, or 3 days. In one embodiment, the cells comprising a CAR molecule are administered every other day for 3 administrations per week. In one embodiment, the cells comprising a CAR molecule are administered for at least two, three, four, five, six, seven, eight or more weeks.

[1237] In one embodiment, the cells expressing a CAR molecule, e.g., a CAR molecule described herein, are administered as a first line treatment for the disease, e.g., the cancer, e.g., the cancer described herein. In another embodiment, the cells expressing a CAR molecule, e.g., a CAR molecule described herein, are administered as a second, third, fourth line treatment for the disease, e.g., the cancer, e.g., the cancer described herein.

[1238] In one embodiment, a population of cells described herein is administered.

[1239] In another aspect, the invention pertains to the isolated nucleic acid molecule encoding a CAR of the invention, the isolated polypeptide molecule of a CAR of the invention, the vector comprising a CAR of the invention, and the cell comprising a CAR of the invention for use as a medicament.

[1240] In another aspect, the invention pertains to a the isolated nucleic acid molecule encoding a CAR of the invention, the isolated polypeptide molecule of a CAR of the invention, the vector comprising a CAR of the invention, and the cell comprising a CAR of the invention for use in the treatment of a disease expressing a cancer associated antigen as described herein.

[1241] In another aspect, the invention pertains to a cell expressing a CAR molecule described herein for use as a medicament in combination with a cytokine, e.g., IL-7, IL-15 and/or IL-21 as described herein. In another aspect, the invention pertains to a cytokine described herein for use as a medicament in combination with a cell expressing a CAR molecule described herein.

[1242] In another aspect, the invention pertains to a cell expressing a CAR molecule described herein for use as a medicament in combination with a kinase inhibitor and/or a checkpoint inhibitor as described herein. In another aspect, the invention pertains to a kinase inhibitor and/or a checkpoint inhibitor described herein for use as a medicament in combination with a cell expressing a CAR molecule described herein.

[1243] In another aspect, the invention pertains to a cell expressing a CAR molecule described herein for use in combination with a cytokine, e.g., IL-7, IL-15 and/or IL-21 as described herein, in the treatment of a disease expressing a tumor antigen targeted by the CAR. In another aspect, the invention pertains to a cytokine described herein for use in combination with a cell expressing a CAR molecule described herein, in the treatment of a disease expressing a tumor antigen targeted by the CAR.

[1244] In another aspect, the invention pertains to a cell expressing a CAR molecule described herein for use in combination with a kinase inhibitor and/or a checkpoint inhibitor as described herein, in the treatment of a disease expressing a tumor antigen targeted by the CAR. In another aspect, the invention pertains to a kinase inhibitor and/or a checkpoint inhibitor described herein for use in combination with a cell expressing a CAR molecule described herein, in the treatment of a disease expressing a tumor antigen targeted by the CAR.

[1245] In another aspect, the present invention provides a method comprising administering a CAR molecule, e.g., a CAR molecule described herein, or a cell comprising a nucleic acid encoding a CAR molecule, e.g., a CAR molecule described herein. In one embodiment, the subject has a disorder described herein, e.g., the subject has cancer, e.g., the subject has a cancer and has tumor-supporting cells which express a tumor-supporting antigen described herein. In one embodiment, the subject is a human.

[1246] In another aspect, the invention pertains to a method of treating a subject having a disease associated with expression of a tumor-supporting antigen as described herein comprising administering to the subject an effective amount of a cell comprising a CAR molecule, e.g., a CAR molecule described herein.

[1247] In yet another aspect, the invention features a method of treating a subject having a disease associated with expression of a tumor-supporting antigen, comprising administering to the subject an effective amount of a cell, e.g., an immune effector cell (e.g., a population of immune effector cells) comprising a CAR molecule, wherein the CAR molecule comprises an antigen binding domain, a transmembrane domain, and an intracellular domain, said intracellular domain comprises a costimulatory domain and/or a primary signaling domain, wherein said antigen binding domain binds to the tumor-supporting antigen associated with the disease, e.g. a tumor-supporting antigen as described herein.

[1248] In another aspect, the invention features a composition comprising an immune effector cell (e.g., a population of immune effector cells) comprising a CAR molecule (e.g., a CAR molecule as described herein) for use in treating a subject having a disease associated with expression of a tumor-supporting antigen, e.g., a disorder as described herein.

[1249] In any of the aforesaid methods or uses, the disease associated with expression of the tumor-supporting antigen is selected from the group consisting of a proliferative disease, a precancerous condition, a cancer, and a non-cancer related indication associated with expression of the tumor-supporting antigen. In an embodiment, the disease associated with a tumor-supporting antigen described herein is a solid tumor.

[1250] In one embodiment of the methods or uses described herein, the CAR molecule is administered in combination with another agent. In one embodiment, the agent can be a kinase inhibitor, e.g., a CDK4/6 inhibitor, a BTK inhibitor, an mTOR inhibitor, a MNK inhibitor, or a dual PI3K/mTOR inhibitor, and combinations thereof. In one embodiment, the kinase inhibitor is a CDK4 inhibitor, e.g., a CDK4 inhibitor described herein, e.g., a CD4/6 inhibitor, such as, e.g., 6-Acetyl-8-cyclopentyl-5-methyl-2-(5-piperazin-1-yl-pyridin-2-ylamino)-8H-pyrido[2,3-d]pyrimidin-7-one, hydrochloride (also referred to as palbociclib or PD0332991). In one embodiment, the kinase inhibitor is a BTK inhibitor, e.g., a BTK inhibitor described herein, such as, e.g., ibrutinib. In one embodiment, the kinase inhibitor is an mTOR inhibitor, e.g., an mTOR inhibitor described herein, such as, e.g., rapamycin, a rapamycin analog, OSI-027. The mTOR inhibitor can be, e.g., an mTORC1 inhibitor and/or an mTORC2 inhibitor, e.g., an mTORC1 inhibitor and/or mTORC2 inhibitor described herein. In one embodiment, the kinase inhibitor is a MNK inhibitor, e.g., a MNK inhibitor described herein, such as, e.g., 4-amino-5-(4-fluoroanilino)-pyrazolo [3,4-d]pyrimidine. The MNK inhibitor can be, e.g., a MNK1a, MNK1b, MNK2a and/or MNK2b inhibitor. The dual PI3K/mTOR inhibitor can be, e.g., PF-04695102.

[1251] In one embodiment of the methods or uses described herein, the kinase inhibitor is a CDK4 inhibitor selected from aloisine A; flavopiridol or HMR-1275, 2-(2-chlorophenyl)-5,7-dihydroxy-8-[(3S,4R)-3-hydroxy-1-methyl-4-piperidinyl]-4-chromenone; crizotinib (PF-02341066; 2-(2-Chlorophenyl)-5,7-dihydroxy-8-[(2R,3S)-2-(hydroxymethyl)-1-methyl-3-pyrrolidinyl]-4H-1-benzopyran-4-one, hydrochloride (P276-00); 1-methyl-5-[[2-[5-(trifluoromethyl)-1H-imidazol-2-yl]-4-pyridinyl]oxy]-N-[4-(trifluoromethyl)phenyl]-1H-benzimidazol-2-amine (RAF265); indisulam (E7070); roscovitine (CYC202); palbociclib (PD0332991); dinaciclib (SCH727965); N-[5-[[(5-tert-butyloxazol-2-yl)methyl]thio]thiazol-2-yl]piperidine-4-carboxamide (BMS 387032); 4-[[9-chloro-7-(2,6-difluorophenyl)-5H-pyrimido[5,4-d][2]benzazepin-2-yl]amino]-benzoic acid (MLN8054); 5-[3-(4,6-difluoro-1H-benzimidazol-2-yl)-1H-indazol-5-yl]-N-ethyl-4-methyl-3-pyridinemethanamine (AG-024322); 4-(2,6-dichlorobenzoylamino)-1H-pyrazole-3-carboxylic acid N-(piperidin-4-yl)amide (AT7519); 4-[2-methyl-1-(1-methylethyl)-1H-imidazol-5-yl]-N-[4-(methylsulfonyl)phenyl]-2-pyrimidinamine (AZD5438); and XL281 (BMS908662).

[1252] In one embodiment of the methods or uses described herein, the kinase inhibitor is a CDK4 inhibitor, e.g., palbociclib (PD0332991), and the palbociclib is administered at a dose of about 50 mg, 60 mg, 70 mg, 75 mg, 80 mg, 90 mg, 100 mg, 105 mg, 110 mg, 115 mg, 120 mg, 125 mg, 130 mg, 135 mg (e.g., 75 mg, 100 mg or 125 mg) daily for a period of time, e.g., daily for 14-21 days of a 28 day cycle, or daily for 7-12 days of a 21 day cycle. In one embodiment, 1, 2, 3, 4, 5, 6, 7, 8, 9, 10, 11, 12 or more cycles of palbociclib are administered.

[1253] In one embodiment of the methods or uses described herein, the kinase inhibitor is a BTK inhibitor selected from ibrutinib (PCI-32765); GDC-0834; RN-486; CGI-560; CGI-1764; HM-71224; CC-292; ONO-4059; CNX-774; and LFM-A13. In one embodiment, the BTK inhibitor does not reduce or inhibit the kinase activity of interleukin-2-inducible kinase (ITK), and is selected from GDC-0834; RN-486; CGI-560; CGI-1764; HM-71224; CC-292; ONO-4059; CNX-774; and LFM-A13.

[1254] In one embodiment of the methods or uses described herein, the kinase inhibitor is a BTK inhibitor, e.g., ibrutinib (PCI-32765), and the ibrutinib is administered at a dose of about 250 mg, 300 mg, 350 mg, 400 mg, 420 mg, 440 mg, 460 mg, 480 mg, 500 mg, 520 mg, 540 mg, 560 mg, 580 mg, 600 mg (e.g., 250 mg, 420 mg or 560 mg) daily for a period of time, e.g., daily for 21 day cycle, or daily for 28 day cycle. In one embodiment, 1, 2, 3, 4, 5, 6, 7, 8, 9, 10, 11, 12 or more cycles of ibrutinib are administered.

[1255] In one embodiment of the methods or uses described herein, the kinase inhibitor is a BTK inhibitor that does not inhibit the kinase activity of ITK, e.g., RN-486, and RN-486 is administered at a dose of about 100 mg, 110 mg, 120 mg, 130 mg, 140 mg, 150 mg, 160 mg, 170 mg, 180 mg, 190 mg, 200 mg, 210 mg, 220 mg, 230 mg, 240 mg, 250 mg (e.g., 150 mg, 200 mg or 250 mg) daily for a period of time, e.g., daily a 28 day cycle. In one embodiment, 1, 2, 3, 4, 5, 6, 7, or more cycles of RN-486 are administered.

[1256] In one embodiment of the methods or uses described herein, the kinase inhibitor is an mTOR inhibitor selected from temsirolimus; ridaforolimus (1R,2R,4S)-4-[(2R)-2 [(1R,9S,12S,15R,16E,18R,19R,21R,23S,24E,26E,28Z,30S,32S,35R)-1,18-dihydroxy-19,30-dimethoxy-15,17,21,23,29,35-hexamethyl-2,3,10,14,20-pentaoxo-11,36-dioxa-4-azatricyclo[30.3.1.0^{4,9}]hexatriaconta-16,24,26,28-tetraen-12-yl]propyl]-2-methoxycyclohexyl dimethylphosphinate, also known as AP23573 and MK8669; everolimus (RAD001); rapamycin (AY22989); simapimod; (5-{2,4-bis[(3S)-3-methylmorpholin-4-yl]pyrido[2,3-d]pyrimidin-7-yl}-2-methoxyphenyl)methanol (AZD8055); 2-amino-8-[trans-4-(2-hydroxyethoxy)cyclohexyl]-6-(6-methoxy-3-pyridinyl)-4-methyl-pyrido[2,3-d]pyrimidin-7(8H)-one (PF04691502); and N²-[1,4-dioxo-4-[[4-(4-oxo-8-phenyl-4H-1-benzopyran-2-yl)morpholinium-4-yl]methoxy]butyl]-L-arginylglycyl-L-α-aspartylL-serine-, inner salt (SF 1126) (SEQ ID NO: 1937); and XL765.

[1257] In one embodiment of the methods or uses described herein, the kinase inhibitor is an mTOR inhibitor, e.g., rapamycin, and the rapamycin is administered at a dose of about 3 mg, 4 mg, 5 mg, 6 mg, 7 mg, 8 mg, 9 mg, 10 mg (e.g., 6 mg) daily for a period of time, e.g., daily for 21 day cycle, or daily for 28 day cycle. In one embodiment, 1, 2, 3, 4, 5, 6, 7, 8, 9, 10, 11, 12 or more cycles of rapamycin are administered. In one embodiment, the kinase inhibitor is an mTOR inhibitor, e.g., everolimus and the everolimus is administered at a dose of about 2 mg, 2.5 mg, 3 mg, 4 mg, 5 mg, 6 mg, 7 mg, 8 mg, 9 mg, 10 mg, 11 mg, 12 mg, 13 mg, 14 mg, 15 mg (e.g., 10 mg) daily for a period of time, e.g., daily for 28 day cycle. In one embodiment, 1, 2, 3, 4, 5, 6, 7, 8, 9, 10, 11, 12 or more cycles of everolimus are administered.

[1258] In one embodiment of the methods or uses described herein, the kinase inhibitor is an MNK inhibitor selected from CGP052088; 4-amino-3-(p-fluorophenylamino)-pyrazolo [3,4-d]pyrimidine (CGP57380); cercosporamide; ETC-1780445-2; and 4-amino-5-(4-fluoroanilino)-pyrazolo [3,4-d]pyrimidine.

[1259] In one embodiment of the methods or uses described herein, the kinase inhibitor is a dual phosphatidylinositol 3-kinase (PI3K) and mTOR inhibitor selected from 2-Amino-8-[trans-4-(2-hydroxyethoxy)cyclohexyl]-6-(6-methoxy-3-pyridinyl)-4-methyl-pyrido[2,3-d]pyrimidin-7(8H)-one (PF-04691502); N-[4-[[4-(Dimethylamino)-1-piperidinyl]carbonyl]phenyl]-N′-[4-(4,6-di-4-morpholinyl-1,3,5-triazin-2-yl)phenyl]urea (PF-05212384, PKI-587); 2-Methyl-2-{4-[3-methyl-2-oxo-8-(quinolin-3-yl)-2,3-dihydro-1H-imidazo[4,5-c]quinolin-1-yl]phenyl}propanenitrile (BEZ-235); apitolisib (GDC-0980, RG7422); 2,4-Difluoro-N-{2-(methyloxy)-5-[4-(4-pyridazinyl)-6-quinolinyl]-3-pyridinyl}benzenesulfonamide (GSK2126458); 8-(6-methoxypyridin-3-yl)-3-methyl-1-(4-(piperazin-1-yl)-3-(trifluoromethyl)phenyl)-1H-imidazo[4,5-c]quinolin-2(3H)-one Maleic acid (NVP-BGT226); 3-[4-(4-Morpholinylpyrido[3′,2′:4,5]furo[3,2-d]pyrimidin-2-yl]phenol (PI-103); 5-(9-isopropyl-8-methyl-2-morpholino-9H-purin-6-yl)pyrimidin-2-amine (VS-5584, SB2343); and N-[2-[(3,5-Dimethoxyphenyl)amino]quinoxalin-3-yl]-4-[(4-methyl-3-methoxyphenyl)carbonyl]aminophenylsulfonamide (XL765).

[1260] In one embodiment of the methods or uses described herein, a CAR expressing immune effector cell described herein is administered to a subject in combination with a protein tyrosine phosphatase inhibitor, e.g., a protein tyrosine phosphatase inhibitor described herein. In one embodiment, the protein tyrosine phosphatase inhibitor is an SHP-1 inhibitor, e.g., an SHP-1 inhibitor described herein, such as, e.g., sodium stibogluconate. In one embodiment, the protein tyrosine phosphatase inhibitor is an SHP-2 inhibitor.

[1261] In one embodiment of the methods or uses described herein, the CAR molecule is administered in combination with another agent, and the agent is a cytokine. The cytokine can be, e.g., IL-7, IL-15, IL-21, or a combination thereof. In another embodiment, the CAR molecule is administered in combination with a checkpoint inhibitor, e.g., a checkpoint inhibitor described herein. For example, in one embodiment, the check point inhibitor inhibits an inhibitory molecule selected from PD-1, PD-L1, CTLA-4, TIM-3, CEACAM (e.g., CEACAM-1, CEACAM-3 and/or CEACAM-5), LAG-3, VISTA, BTLA, TIGIT, LAIR1, CD160, 2B4 and TGF beta.

[1262] In one aspect, the CAR of the invention can be used to eradicate a normal cell that express a tumor antigen as described herein, thereby applicable for use as a cellular conditioning therapy prior to cell transplantation. In one aspect, the normal cell that expresses a tumor antigen as described herein is a normal stem cell and the cell transplantation is a stem cell transplantation.

### Therapeutic Applications

[1263] In another aspect, a method of treating a subject, e.g., reducing or ameliorating, a hyperproliferative condition or disorder (e.g., a cancer), e.g., solid tumor, a soft tissue tumor, or a metastatic lesion, in a subject is provided. As used herein, the term “cancer” is meant to include all types of cancerous growths or oncogenic processes, metastatic tissues or malignantly transformed cells, tissues, or organs, irrespective of histopathologic type or stage of invasiveness. Examples of solid tumors include malignancies, e.g., sarcomas, adenocarcinomas, and carcinomas, of the various organ systems, such as those affecting liver, lung, breast, lymphoid, gastrointestinal (e.g., colon), genitourinary tract (e.g., renal, urothelial cells), prostate and pharynx. Adenocarcinomas include malignancies such as most colon cancers, rectal cancer, renal-cell carcinoma, liver cancer, non-small cell carcinoma of the lung, cancer of the small intestine and cancer of the esophagus. In one embodiment, the cancer is a melanoma, e.g., an advanced stage melanoma. Metastatic lesions of the aforementioned cancers can also be treated or prevented using the methods and compositions of the invention. Examples of other cancers that can be treated include bone cancer, pancreatic cancer, skin cancer, cancer of the head or neck, cutaneous or intraocular malignant melanoma, uterine cancer, ovarian cancer, rectal cancer, cancer of the anal region, stomach cancer, testicular cancer, uterine cancer, carcinoma of the fallopian tubes, carcinoma of the endometrium, carcinoma of the cervix, carcinoma of the vagina, carcinoma of the vulva, Hodgkin Disease, non-Hodgkin lymphoma, cancer of the esophagus, cancer of the small intestine, cancer of the endocrine system, cancer of the thyroid gland, cancer of the parathyroid gland, cancer of the adrenal gland, sarcoma of soft tissue, cancer of the urethra, cancer of the penis, chronic or acute leukemias including acute myeloid leukemia, chronic myeloid leukemia, acute lymphoblastic leukemia, chronic lymphocytic leukemia, solid tumors of childhood, lymphocytic lymphoma, cancer of the bladder, cancer of the kidney or ureter, carcinoma of the renal pelvis, neoplasm of the central nervous system (CNS), primary CNS lymphoma, tumor angiogenesis, spinal axis tumor, brain stem glioma, pituitary adenoma, Kaposi's sarcoma, epidermoid cancer, squamous cell cancer, T-cell lymphoma, environmentally induced cancers including those induced by asbestos, and combinations of said cancers. Treatment of metastatic cancers, e.g., metastatic cancers that express PD-L1 (Iwai et al. (2005) Int. Immunol. 17:133-144) can be effected using the antibody molecules described herein.

[1264] Exemplary cancers whose growth can be inhibited include cancers typically responsive to immunotherapy. Non-limiting examples of cancers for treatment include melanoma (e.g., metastatic malignant melanoma), renal cancer (e.g. clear cell carcinoma), prostate cancer (e.g. hormone refractory prostate adenocarcinoma), breast cancer, colon cancer and lung cancer (e.g. non-small cell lung cancer). Additionally, refractory or recurrent malignancies can be treated using the molecules described herein.

[1265] In one aspect, the invention pertains to a vector comprising a CAR operably linked to promoter for expression in mammalian immune effector cells (e.g., T cells, NK cells). In one aspect, the invention provides a recombinant immune effector cell expressing a CAR of the present invention for use in treating cancer expressing a cancer associate antigen as described herein. In one aspect, CAR-expressing cells of the invention is capable of contacting a tumor cell with at least one cancer associated antigen expressed on its surface such that the CAR-expressing cell targets the cancer cell and growth of the cancer is inhibited.

[1266] In one aspect, the invention pertains to a method of inhibiting growth of a cancer, comprising contacting the cancer cell with a CAR-expressing cell of the present invention such that the CART is activated in response to the antigen and targets the cancer cell, wherein the growth of the tumor is inhibited.

[1267] In one aspect, the invention pertains to a method of treating cancer in a subject. The method comprises administering to the subject CAR-expressing cell of the present invention such that the cancer is treated in the subject. In one aspect, the cancer associated with expression of a cancer associate antigen as described herein is a hematological cancer. In one aspect, the hematological cancer is a leukemia or a lymphoma. In one aspect, a cancer associated with expression of a cancer associate antigen as described herein includes cancers and malignancies including, but not limited to, e.g., one or more acute leukemias including but not limited to, e.g., B-cell acute Lymphoid Leukemia (“BALL”), T-cell acute Lymphoid Leukemia (“TALL”), acute lymphoid leukemia (ALL); one or more chronic leukemias including but not limited to, e.g., chronic myelogenous leukemia (CML), Chronic Lymphoid Leukemia (CLL). Additional cancers or hematologic conditions associated with expression of a cancer associate antigen as described herein include, but are not limited to, e.g., B cell prolymphocytic leukemia, blastic plasmacytoid dendritic cell neoplasm, Burkitt's lymphoma, diffuse large B cell lymphoma, Follicular lymphoma, Hairy cell leukemia, small cell- or a large cell-follicular lymphoma, malignant lymphoproliferative conditions, MALT lymphoma, mantle cell lymphoma, Marginal zone lymphoma, multiple myeloma, myelodysplasia and myelodysplastic syndrome, non-Hodgkin lymphoma, plasmablastic lymphoma, plasmacytoid dendritic cell neoplasm, Waldenstrom macroglobulinemia, and “preleukemia” which are a diverse collection of hematological conditions united by ineffective production (or dysplasia) of myeloid blood cells, and the like. Further a disease associated with a cancer associate antigen as described herein expression include, but not limited to, e.g., atypical and/or non-classical cancers, malignancies, precancerous conditions or proliferative diseases associated with expression of a cancer associate antigen as described herein.

[1268] In some embodiments, a cancer that can be treated with CAR-expressing cell of the present invention is multiple myeloma. Generally, myeloma cells are thought to be negative for a cancer associate antigen as described herein expression by flow cytometry. Thus, in some embodiments, a CD19 CAR, e.g., as described herein, may be used to target myeloma cells. In some embodiments, cars of the present invention therapy can be used in combination with one or more additional therapies, e.g., lenalidomide treatment.

[1269] The invention includes a type of cellular therapy where immune effector cells (e.g., T cells, NK cells) are genetically modified to express a chimeric antigen receptor (CAR) and the CAR-expressing T cell or NK cell is infused to a recipient in need thereof. The infused cell is able to kill tumor cells in the recipient. Unlike antibody therapies, CAR-modified immune effector cells (e.g., T cells, NK cells) are able to replicate in vivo resulting in long-term persistence that can lead to sustained tumor control. In various aspects, the immune effector cells (e.g., T cells, NK cells) administered to the patient, or their progeny, persist in the patient for at least four months, five months, six months, seven months, eight months, nine months, ten months, eleven months, twelve months, thirteen months, fourteen month, fifteen months, sixteen months, seventeen months, eighteen months, nineteen months, twenty months, twenty-one months, twenty-two months, twenty-three months, two years, three years, four years, or five years after administration of the T cell or NK cell to the patient.

[1270] The invention also includes a type of cellular therapy where immune effector cells (e.g., T cells, NK cells) are modified, e.g., by in vitro transcribed RNA, to transiently express a chimeric antigen receptor (CAR) and the CAR T cell or NK cell is infused to a recipient in need thereof. The infused cell is able to kill tumor cells in the recipient. Thus, in various aspects, the immune effector cells (e.g., T cells, NK cells) administered to the patient, is present for less than one month, e.g., three weeks, two weeks, one week, after administration of the T cell or NK cell to the patient.

[1271] Without wishing to be bound by any particular theory, the anti-tumor immunity response elicited by the CAR-modified immune effector cells (e.g., T cells, NK cells) may be an active or a passive immune response, or alternatively may be due to a direct vs indirect immune response. In one aspect, the CAR transduced immune effector cells (e.g., T cells, NK cells) exhibit specific proinflammatory cytokine secretion and potent cytolytic activity in response to human cancer cells expressing the a cancer associate antigen as described herein, resist soluble a cancer associate antigen as described herein inhibition, mediate bystander killing and mediate regression of an established human tumor. For example, antigen-less tumor cells within a heterogeneous field of a cancer associate antigen as described herein-expressing tumor may be susceptible to indirect destruction by a cancer associate antigen as described herein-redirected immune effector cells (e.g., T cells, NK cells) that has previously reacted against adjacent antigen-positive cancer cells.

[1272] In one aspect, the fully-human CAR-modified immune effector cells (e.g., T cells, NK cells) of the invention may be a type of vaccine for ex vivo immunization and/or in vivo therapy in a mammal. In one aspect, the mammal is a human.

[1273] With respect to ex vivo immunization, at least one of the following occurs in vitro prior to administering the cell into a mammal: i) expansion of the cells, ii) introducing a nucleic acid encoding a CAR to the cells or iii) cryopreservation of the cells.

[1274] Ex vivo procedures are well known in the art and are discussed more fully below. Briefly, cells are isolated from a mammal (e.g., a human) and genetically modified (i.e., transduced or transfected in vitro) with a vector expressing a CAR disclosed herein. The CAR-modified cell can be administered to a mammalian recipient to provide a therapeutic benefit. The mammalian recipient may be a human and the CAR-modified cell can be autologous with respect to the recipient. Alternatively, the cells can be allogeneic, syngeneic or xenogeneic with respect to the recipient.

[1275] The procedure for ex vivo expansion of hematopoietic stem and progenitor cells is described in U.S. Pat. No. 5,199,942, incorporated herein by reference, can be applied to the cells of the present invention. Other suitable methods are known in the art, therefore the present invention is not limited to any particular method of ex vivo expansion of the cells. Briefly, ex vivo culture and expansion of immune effector cells (e.g., T cells, NK cells) comprises: (1) collecting CD34+ hematopoietic stem and progenitor cells from a mammal from peripheral blood harvest or bone marrow explants; and (2) expanding such cells ex vivo. In addition to the cellular growth factors described in U.S. Pat. No. 5,199,942, other factors such as flt3-L, IL-1, IL-3 and c-kit ligand, can be used for culturing and expansion of the cells. In addition to using a cell-based vaccine in terms of ex vivo immunization, the present invention also provides compositions and methods for in vivo immunization to elicit an immune response directed against an antigen in a patient.

[1276] Generally, the cells activated and expanded as described herein may be utilized in the treatment and prevention of diseases that arise in individuals who are immunocompromised. In particular, the CAR-modified immune effector cells (e.g., T cells, NK cells) of the invention are used in the treatment of diseases, disorders and conditions associated with expression of a cancer associate antigen as described herein. In certain aspects, the cells of the invention are used in the treatment of patients at risk for developing diseases, disorders and conditions associated with expression of a cancer associate antigen as described herein. Thus, the present invention provides methods for the treatment or prevention of diseases, disorders and conditions associated with expression of a cancer associate antigen as described herein comprising administering to a subject in need thereof, a therapeutically effective amount of the CAR-modified immune effector cells (e.g., T cells, NK cells) of the invention.

[1277] In one aspect the CAR-expressing cells of the inventions may be used to treat a proliferative disease such as a cancer or malignancy or is a precancerous condition such as a myelodysplasia, a myelodysplastic syndrome or a preleukemia. Further a disease associated with a cancer associate antigen as described herein expression include, but not limited to, e.g., atypical and/or non-classical cancers, malignancies, precancerous conditions or proliferative diseases expressing a cancer associated antigen as described herein. Non-cancer related indications associated with expression of a cancer associate antigen as described herein include, but are not limited to, e.g., autoimmune disease, (e.g., lupus), inflammatory disorders (allergy and asthma) and transplantation.

[1278] The CAR-modified immune effector cells (e.g., T cells, NK cells) of the present invention may be administered either alone, or as a pharmaceutical composition in combination with diluents and/or with other components such as IL-2 or other cytokines or cell populations.

### Hematologic Cancer

[1279] Hematological cancer conditions are the types of cancer such as leukemia, lymphoma, and malignant lymphoproliferative conditions that affect blood, bone marrow and the lymphatic system.

[1280] Leukemia can be classified as acute leukemia and chronic leukemia. Acute leukemia can be further classified as acute myelogenous leukemia (AML) and acute lymphoid leukemia (ALL). Chronic leukemia includes chronic myelogenous leukemia (CML) and chronic lymphoid leukemia (CLL). Other related conditions include myelodysplastic syndromes (MDS, formerly known as “preleukemia”) which are a diverse collection of hematological conditions united by ineffective production (or dysplasia) of myeloid blood cells and risk of transformation to AML.

[1281] Lymphoma is a group of blood cell tumors that develop from lymphocytes. Exemplary lymphomas include non-Hodgkin lymphoma and Hodgkin lymphoma.

[1282] The present invention also provides methods for inhibiting the proliferation or reducing a cancer associated antigen as described herein-expressing cell population, the methods comprising contacting a population of cells comprising a cancer associated antigen as described herein-expressing cell with a CAR-expressing T cell or NK cell of the invention that binds to the a cancer associate antigen as described herein-expressing cell. In a specific aspect, the present invention provides methods for inhibiting the proliferation or reducing the population of cancer cells expressing a cancer associated antigen as described herein, the methods comprising contacting a cancer associate antigen as described herein-expressing cancer cell population with a CAR-expressing T cell or NK cell of the invention that binds to a cancer associated antigen as described herein-expressing cell. In one aspect, the present invention provides methods for inhibiting the proliferation or reducing the population of cancer cells expressing a cancer associated antigen as described herein, the methods comprising contacting a cancer associated antigen as described herein-expressing cancer cell population with a CAR-expressing T cell or NK cell of the invention that binds to a cancer associated antigen as described herein-expressing cell. In certain aspects, a CAR-expressing T cell or NK cell of the invention reduces the quantity, number, amount or percentage of cells and/or cancer cells by at least 25%, at least 30%, at least 40%, at least 50%, at least 65%, at least 75%, at least 85%, at least 95%, or at least 99% in a subject with or animal model for myeloid leukemia or another cancer associated with a cancer associated antigen as described herein-expressing cells relative to a negative control. In one aspect, the subject is a human.

[1283] The present invention also provides methods for preventing, treating and/or managing a disease associated with a cancer associated antigen as described herein-expressing cells (e.g., a hematologic cancer or atypical cancer expressing a cancer associated antigen as described herein), the methods comprising administering to a subject in need a CAR T cell or NK cell of the invention that binds to a cancer associated antigen as described herein-expressing cell. In one aspect, the subject is a human. Non-limiting examples of disorders associated with a cancer associated antigen as described herein-expressing cells include autoimmune disorders (such as lupus), inflammatory disorders (such as allergies and asthma) and cancers (such as hematological cancers or atypical cancers expressing a cancer associated antigen as described herein).

[1284] The present invention also provides methods for preventing, treating and/or managing a disease associated with a cancer associated antigen as described herein-expressing cells, the methods comprising administering to a subject in need a CAR T cell or NK cell of the invention that binds to a cancer associated antigen as described herein-expressing cell. In one aspect, the subject is a human.

[1285] The present invention provides methods for preventing relapse of cancer associated with a cancer associated antigen as described herein-expressing cells, the methods comprising administering to a subject in need thereof aCAR T cell or NK cell of the invention that binds to a cancer associated antigen as described herein-expressing cell. In one aspect, the methods comprise administering to the subject in need thereof an effective amount of a CAR-expressing T cell or NK cell described herein that binds to a cancer associated antigen as described herein-expressing cell in combination with an effective amount of another therapy.

### Pharmaceutical Compositions and Treatments: Combinations of LSD1 Inhibitors and CAR-Expressing Cells

[1286] Pharmaceutical compositions of the present invention may comprise a CAR-expressing cell, e.g., a plurality of CAR-expressing cells, as described herein, in combination with one or more pharmaceutically or physiologically acceptable carriers, diluents or excipients. The pharmaceutical compositions may additionally comprise one or more, e.g., one LSD1 inhibitor. Such compositions may comprise buffers such as neutral buffered saline, phosphate buffered saline and the like; carbohydrates such as glucose, mannose, sucrose or dextrans, mannitol; proteins; polypeptides or amino acids such as glycine; antioxidants; chelating agents such as EDTA or glutathione; adjuvants (e.g., aluminum hydroxide); and preservatives. Compositions of the present invention are in one aspect formulated for intravenous administration.

[1287] Pharmaceutical compositions of the present invention may be administered in a manner appropriate to the disease to be treated (or prevented). The quantity and frequency of administration will be determined by such factors as the condition of the patient, and the type and severity of the patient's disease, although appropriate dosages may be determined by clinical trials.

[1288] In one embodiment, the pharmaceutical composition is substantially free of, e.g., there are no detectable levels of a contaminant, e.g., selected from the group consisting of endotoxin, mycoplasma, replication competent lentivirus (RCL), p24, VSV-G nucleic acid, HIV gag, residual anti-CD3/anti-CD28 coated beads, mouse antibodies, pooled human serum, bovine serum albumin, bovine serum, culture media components, vector packaging cell or plasmid components, a bacterium and a fungus. In one embodiment, the bacterium is at least one selected from the group consisting of Alcaligenes faecalis, Candida albicans, Escherichia coli, Haemophilus influenza, Neisseria meningitides, Pseudomonas aeruginosa, Staphylococcus aureus, Streptococcus pneumonia, and Streptococcus pyogenes group A.

[1289] When “an immunologically effective amount,” “an anti-tumor effective amount,” “a tumor-inhibiting effective amount,” or “therapeutic amount” is indicated, the precise amount of the compositions of the present invention to be administered can be determined by a physician with consideration of individual differences in age, weight, tumor size, extent of infection or metastasis, and condition of the patient (subject). It can generally be stated that a pharmaceutical composition comprising the immune effector cells (e.g., T cells, NK cells) described herein may be administered at a dosage of 10⁴ to 10¹ cells/kg body weight, in some instances 10⁵ to 10⁶ cells/kg body weight, including all integer values within those ranges. T cell compositions may also be administered multiple times at these dosages. The cells can be administered by using infusion techniques that are commonly known in immunotherapy (see, e.g., Rosenberg et al., New Eng. J. of Med. 319:1676, 1988).

[1290] In certain aspects, it may be desired to administer activated immune effector cells (e.g., T cells, NK cells) to a subject and then subsequently redraw blood (or have an apheresis performed), activate immune effector cells (e.g., T cells, NK cells) therefrom according to the present invention, and reinfuse the patient with these activated and expanded immune effector cells (e.g., T cells, NK cells). This process can be carried out multiple times every few weeks. In certain aspects, immune effector cells (e.g., T cells, NK cells) can be activated from blood draws of from 10 cc to 400 cc. In certain aspects, immune effector cells (e.g., T cells, NK cells) are activated from blood draws of 20 cc, 30 cc, 40 cc, 50 cc, 60 cc, 70 cc, 80 cc, 90 cc, or 100 cc.

[1291] The administration of the subject compositions may be carried out in any convenient manner, including by aerosol inhalation, injection, ingestion, transfusion, implantation or transplantation. The compositions described herein may be administered to a patient trans arterially, subcutaneously, intradermally, intratumorally, intranodally, intramedullary, intramuscularly, by intravenous (i.v.) injection, or intraperitoneally. In one aspect, the T cell compositions of the present invention are administered to a patient by intradermal or subcutaneous injection. In one aspect, the T cell compositions of the present invention are administered by i.v. injection. The compositions of immune effector cells (e.g., T cells, NK cells) may be injected directly into a tumor, lymph node, or site of infection.

[1292] In a particular exemplary aspect, subjects may undergo leukapheresis, wherein leukocytes are collected, enriched, or depleted ex vivo to select and/or isolate the cells of interest, e.g., T cells. These T cell isolates may be expanded by methods known in the art and treated such that one or more CAR constructs of the invention may be introduced, thereby creating a CAR T cell of the invention. Subjects in need thereof may subsequently undergo standard treatment with high dose chemotherapy followed by peripheral blood stem cell transplantation. In certain aspects, following or concurrent with the transplant, subjects receive an infusion of the expanded CAR T cells of the present invention. In an additional aspect, expanded cells are administered before or following surgery.

[1293] The dosage of the above treatments to be administered to a patient will vary with the precise nature of the condition being treated and the recipient of the treatment. The scaling of dosages for human administration can be performed according to art-accepted practices. The dose for CAMPATH, for example, will generally be in the range 1 to about 100 mg for an adult patient, usually administered daily for a period between 1 and 30 days. The preferred daily dose is 1 to 10 mg per day although in some instances larger doses of up to 40 mg per day may be used (described in U.S. Pat. No. 6,120,766).

[1294] In one embodiment, the CAR is introduced into immune effector cells (e.g., T cells, NK cells), e.g., using in vitro transcription, and the subject (e.g., human) receives an initial administration of CAR immune effector cells (e.g., T cells, NK cells) of the invention, and one or more subsequent administrations of the CAR immune effector cells (e.g., T cells, NK cells) of the invention, wherein the one or more subsequent administrations are administered less than 15 days, e.g., 14, 13, 12, 11, 10, 9, 8, 7, 6, 5, 4, 3, or 2 days after the previous administration. In one embodiment, more than one administration of the CAR immune effector cells (e.g., T cells, NK cells) of the invention are administered to the subject (e.g., human) per week, e.g., 2, 3, or 4 administrations of the CAR immune effector cells (e.g., T cells, NK cells) of the invention are administered per week. In one embodiment, the subject (e.g., human subject) receives more than one administration of the CAR immune effector cells (e.g., T cells, NK cells) per week (e.g., 2, 3 or 4 administrations per week) (also referred to herein as a cycle), followed by a week of no CAR immune effector cells (e.g., T cells, NK cells) administrations, and then one or more additional administration of the CAR immune effector cells (e.g., T cells, NK cells) (e.g., more than one administration of the CAR immune effector cells (e.g., T cells, NK cells) per week) is administered to the subject. In another embodiment, the subject (e.g., human subject) receives more than one cycle of CAR immune effector cells (e.g., T cells, NK cells), and the time between each cycle is less than 10, 9, 8, 7, 6, 5, 4, or 3 days. In one embodiment, the CAR immune effector cells (e.g., T cells, NK cells) are administered every other day for 3 administrations per week. In one embodiment, the CAR immune effector cells (e.g., T cells, NK cells) of the invention are administered for at least two, three, four, five, six, seven, eight or more weeks.

[1295] In one aspect, CAR-expressing cells of the present inventions are generated using lentiviral viral vectors, such as lentivirus. Cells, e.g., CARTs, generated that way will have stable CAR expression.

[1296] In one aspect, CAR-expressing cells, e.g., CARTs, are generated using a viral vector such as a gammaretroviral vector, e.g., a gammaretroviral vector described herein. CARTs generated using these vectors can have stable CAR expression.

[1297] In one aspect, CARTs transiently express CAR vectors for 4, 5, 6, 7, 8, 9, 10, 11, 12, 13, 14, 15 days after transduction. Transient expression of CARs can be effected by RNA CAR vector delivery. In one aspect, the CAR RNA is transduced into the T cell by electroporation.

[1298] A potential issue that can arise in patients being treated using transiently expressing CAR immune effector cells (e.g., T cells, NK cells) (particularly with murine scFv bearing CARTs) is anaphylaxis after multiple treatments.

[1299] Without being bound by this theory, it is believed that such an anaphylactic response might be caused by a patient developing humoral anti-CAR response, i.e., anti-CAR antibodies having an anti-IgE isotype. It is thought that a patient's antibody producing cells undergo a class switch from IgG isotype (that does not cause anaphylaxis) to IgE isotype when there is a ten to fourteen day break in exposure to antigen.

[1300] If a patient is at high risk of generating an anti-CAR antibody response during the course of transient CAR therapy (such as those generated by RNA transductions), CART infusion breaks should not last more than ten to fourteen days.

### Methods of Making CAR-Expressing Cells

[1301] In another aspect, the invention pertains to a method of making a cell (e.g., an immune effector cell or population thereof) comprising introducing into (e.g., transducing) a cell, e.g., a T cell or a NK cell described herein, with a vector of comprising a nucleic acid encoding a CAR molecule, e.g., a CAR molecule described herein; or a nucleic acid encoding a CAR molecule e.g., a CAR described herein.

[1302] The cell in the methods is an immune effector cell (e.g., a T cell or a NK cell, or a combination thereof). In some embodiments, the cell in the methods is diaglycerol kinase (DGK) and/or Ikaros deficient.

[1303] In some embodiment, the introducing the nucleic acid molecule encoding a CAR molecule comprises transducing a vector comprising the nucleic acid molecule encoding a CAR molecule, or transfecting the nucleic acid molecule encoding a CAR molecule, wherein the nucleic acid molecule is an in vitro transcribed RNA.

[1304] In some embodiments, the method further comprises:
[1305] providing a population of immune effector cells (e.g., T cells or NK cells); and
[1306] removing T regulatory cells from the population, thereby providing a population of T regulatory-depleted cells;
[1307] wherein steps a) and b) are performed prior to introducing the nucleic acid encoding the CAR molecule to the population.

[1308] In embodiments of the methods, the T regulatory cells comprise CD25+ T cells, and are removed from the cell population using an anti-CD25 antibody, or fragment thereof. The anti-CD25 antibody, or fragment thereof, can be conjugated to a substrate, e.g., a bead.

[1309] In other embodiments, the population of T regulatory-depleted cells provided from step (b) contains less than 30%, 25%, 20%, 15%, 10%, 5%, 4%, 3%, 2%, 1% of CD25+ cells.

[1310] In yet other embodiments, the method further comprises removing cells from the population which express a tumor antigen that does not comprise CD25 to provide a population of T regulatory-depleted and tumor antigen depleted cells prior to introducing the nucleic acid encoding a CAR molecule to the population. The tumor antigen can be selected from CD19, CD30, CD38, CD123, CD20, CD14 or CD11b, or a combination thereof.

[1311] In other embodiments, the method further comprises removing cells from the population which express a checkpoint inhibitor, to provide a population of T regulatory-depleted and inhibitory molecule depleted cells prior to introducing the nucleic acid encoding a CAR molecule to the population. The checkpoint inhibitor can be chosen from PD-1, LAG-3, TIM3, B7-H1, CD160, P1H, 2B4, CEACAM (e.g., CEACAM-1, CEACAM-3, and/or CEACAM-5), TIGIT, CTLA-4, BTLA, and LAIR1.

[1312] Further embodiments disclosed herein encompass providing a population of immune effector cells. The population of immune effector cells provided can be selected based upon the expression of one or more of CD3, CD28, CD4, CD8, CD45RA, and/or CD45RO. In certain embodiments, the population of immune effector cells provided are CD3+ and/or CD28+.

[1313] In certain embodiments of the method, the method further comprises expanding the population of cells after the nucleic acid molecule encoding a CAR molecule has been introduced.

[1314] In embodiments, the population of cells is expanded for a period of 8 days or less.

[1315] In certain embodiments, the population of cells is expanded in culture for 5 days, and the resulting cells are more potent than the same cells expanded in culture for 9 days under the same culture conditions.

[1316] In other embodiments, the population of cells is expanded in culture for 5 days show at least a one, two, three or four fold increase in cell doublings upon antigen stimulation as compared to the same cells expanded in culture for 9 days under the same culture conditions.

[1317] In yet other embodiments, the population of cells is expanded in culture for 5 days, and the resulting cells exhibit higher proinflammatory IFN-γ and/or GM-CSF levels, as compared to the same cells expanded in culture for 9 days under the same culture conditions.

[1318] In other embodiments, the population of cells is expanded by culturing the cells in the presence of an agent that stimulates a CD3/TCR complex associated signal and/or a ligand that stimulates a costimulatory molecule on the surface of the cells. The agent can be a bead conjugated with anti-CD3 antibody, or a fragment thereof, and/or anti-CD28 antibody, or a fragment thereof.

[1319] In other embodiments, the population of cells is expanded in an appropriate media that includes one or more interleukin that result in at least a 200-fold, 250-fold, 300-fold, or 350-fold increase in cells over a 14 day expansion period, as measured by flow cytometry.

[1320] In other embodiments, the population of cells is expanded in the presence IL-15 and/or IL-7.

[1321] In certain embodiments, the method further includes cryopreserving he population of the cells after the appropriate expansion period.

[1322] In yet other embodiments, the method of making disclosed herein further comprises contacting the population of immune effector cells with a nucleic acid encoding a telomerase subunit, e.g., hTERT. The nucleic acid encoding the telomerase subunit can be DNA.

[1323] The present invention also provides a method of generating a population of RNA-engineered cells, e.g., cells described herein, e.g., immune effector cells (e.g., T cells, NK cells), transiently expressing exogenous RNA. The method comprises introducing an in vitro transcribed RNA or synthetic RNA into a cell, where the RNA comprises a nucleic acid encoding a CAR molecule described herein.

[1324] In another aspect, the invention pertains to a method of providing an anti-tumor immunity in a subject comprising administering to the subject an effective amount of a cell comprising a CAR molecule, e.g., a cell expressing a CAR molecule described herein. In one embodiment, the cell is an autologous T cell or NK cell. In one embodiment, the cell is an allogeneic T cell or NK cell. In one embodiment, the subject is a human.

[1325] In one aspect, the invention includes a population of autologous cells that are transfected or transduced with a vector comprising a nucleic acid molecule encoding a CAR molecule, e.g., as described herein. In one embodiment, the vector is a retroviral vector. In one embodiment, the vector is a self-inactivating lentiviral vector as described elsewhere herein. In one embodiment, the vector is delivered (e.g., by transfecting or electroporating) to a cell, e.g., a T cell or a NK cell, wherein the vector comprises a nucleic acid molecule encoding a CAR of the present invention as described herein, which is transcribed as an mRNA molecule, and the CARs of the present invention is translated from the RNA molecule and expressed on the surface of the cell.

[1326] In another aspect, the present invention provides a population of CAR-expressing cells, e.g., CAR-expressing immune effector cells (e.g., T cells or NK cells). In some embodiments, the population of CAR-expressing cells comprises a mixture of cells expressing different CARs. For example, in one embodiment, the population of CAR-expressing immune effector cells (e.g., T cells or NK cells) can include a first cell expressing a CAR having an antigen binding domain that binds to a first tumor antigen as described herein, and a second cell expressing a CAR having a different antigen binding domain that binds to a second tumor antigen as described herein. As another example, the population of CAR-expressing cells can include a first cell expressing a CAR that includes an antigen binding domain that binds to a tumor antigen as described herein, and a second cell expressing a CAR that includes an antigen binding domain to a target other than a tumor antigen as described herein. In one embodiment, the population of CAR-expressing cells includes, e.g., a first cell expressing a CAR that includes a primary intracellular signaling domain, and a second cell expressing a CAR that includes a secondary signaling domain, e.g., a costimulatory signaling domain.

[1327] In another aspect, the present invention provides a population of cells wherein at least one cell in the population expresses a CAR having an antigen binding domain that binds to a tumor antigen as described herein, and a second cell expressing another agent, e.g., an agent which enhances the activity of a CAR-expressing cell. For example, in one embodiment, the agent can be an agent which inhibits an inhibitory molecule. Examples of inhibitory molecules include PD-1, PD-L1, CTLA-4, TIM-3, CEACAM (e.g., CEACAM-1, CEACAM-3 and/or CEACAM-5), LAG-3, VISTA, BTLA, TIGIT, LAIR1, CD160, 2B4 and TGF beta. In one embodiment, the agent which inhibits an inhibitory molecule, e.g., is a molecule described herein, e.g., an agent that comprises a first polypeptide, e.g., an inhibitory molecule, associated with a second polypeptide that provides a positive signal to the cell, e.g., an intracellular signaling domain described herein. In one embodiment, the agent comprises a first polypeptide, e.g., of an inhibitory molecule such as PD-1, LAG-3, CTLA-4, CD160, BTLA, LAIR1, TIM-3, CEACAM (e.g., CEACAM-1, CEACAM-3 and/or CEACAM-5), 2B4 and TIGIT, or a fragment of any of these, and a second polypeptide which is an intracellular signaling domain described herein (e.g., comprising a costimulatory domain (e.g., 41BB, CD27 or CD28, e.g., as described herein) and/or a primary signaling domain (e.g., a CD3 zeta signaling domain described herein). In one embodiment, the agent comprises a first polypeptide of PD-1 or a fragment thereof, and a second polypeptide of an intracellular signaling domain described herein (e.g., a CD28, CD27, OX40 or 4-IBB signaling domain described herein and/or a CD3 zeta signaling domain described herein).

[1328] In one embodiment, the nucleic acid molecule encoding a CAR of the present invention molecule, e.g., as described herein, is expressed as an mRNA molecule. In one embodiment, the genetically modified CAR of the present invention-expressing cells, e.g., immune effector cells (e.g., T cells, NK cells), can be generated by transfecting or electroporating an RNA molecule encoding the desired CARs (e.g., without a vector sequence) into the cell. In one embodiment, a CAR of the present invention molecule is translated from the RNA molecule once it is incorporated and expressed on the surface of the recombinant cell.

[1329] A method for generating mRNA for use in transfection involves in vitro transcription (IVT) of a template with specially designed primers, followed by polyA addition, to produce a construct containing 3′ and 5′ untranslated sequence (“UTR”) (e.g., a 3′ and/or 5′ UTR described herein), a 5′ cap (e.g., a 5′ cap described herein) and/or Internal Ribosome Entry Site (IRES) (e.g., an IRES described herein), the nucleic acid to be expressed, and a polyA tail, typically 50-2000 bases in length (SEQ ID NO:32). RNA so produced can efficiently transfect different kinds of cells. In one embodiment, the template includes sequences for the CAR. In an embodiment, an RNA CAR vector is transduced into a cell, e.g., a T cell or a NK cell, by electroporation.

TABLE 18
Sequences of various components of CAR (aa—amino acids,
na—nucleic acids that encodes the corresponding protein)

| SEQ | | |
|---|---|---|
| ID NO | description | Sequence |
| 1 | EF-1 | CGTGAGGCTCCGGTGCCCGTCAGTGGGCAGAGCGCACATCGCCCAC |
| | promoter | AGTCCCCGAGAAGTTGGGGGGAGGGGTCGGCAATTGAACCGGTGC |
| | | CTAGAGAAGGTGGCGCGGGGTAAACTGGGAAAGTGATGTCGTGTA |
| | | CTGGCTCCGCCTTTTTCCCGAGGGTGGGGGAGAACCGTATATAAGT |
| | | GCAGTAGTCGCCGTGAACGTTCTTTTTCGCAACGGGTTTGCCGCCAG |
| | | AACACAGGTAAGTGCCGTGTGTGGTTCCCGCGGGCCTGGCCTCTTTA |
| | | CGGGTTATGGCCCTTGCGTGCCTTGAATTACTTCCACCTGGCTGCAG |
| | | TACGTGATTCTTGATCCCGAGCTTCGGGTTGGAAGTGGGTGGGAGA |
| | | GTTCGAGGCCTTGCGCTTAAGGAGCCCCTTCGCCTCGTGCTTGAGTT |
| | | GAGGCCTGGCCTGGGCGCTGGGGCCGCCGCGTGCGAATCTGGTGG |
| | | CACCTTCGCGCCTGTCTCGCTGCTTTCGATAAGTCTCTAGCCATTTAA |
| | | AATTTTTGATGACCTGCTGCGACGCTTTTTTTCTGGCAAGATAGTCTT |
| | | GTAAATGCGGGCCAAGATCTGCACACTGGTATTTCGGTTTTTGGGGC |
| | | CGCGGGCGGCGACGGGGCCCGTGCGTCCCAGCGCACATGTTCGGC |
| | | GAGGCGGGGCCTGCGAGCGCGGCCACCGAGAATCGGACGGGGGTA |
| | | GTCTCAAGCTGGCCGGCCTGCTCTGGTGCCTGGCCTCGCGCCGCCGT |
| | | GTATCGCCCCGCCCTGGGCGGCAAGGCTGGCCCGGTCGGCACCAGT |
| | | TGCGTGAGCGGAAAGATGGCCGCTTCCCGGCCCTGCTGCAGGGAGC |
| | | TCAAAATGGAGGACGCGGCGCTCGGGAGAGCGGGCGGGTGAGTCA |
| | | CCCACACAAAGGAAAAGGGCCTTTCCGTCCTCAGCCGTCGCTTCATG |
| | | TGACTCCACGGAGTACCGGGCGCCGTCCAGGCACCTCGATTAGTTCT |
| | | CGAGCTTTTGGAGTACGTCGTCTTTAGGTTGGGGGGAGGGGTTTTAT |
| | | GCGATGGAGTTTCCCCACACTGAGTGGGTGGAGACTGAAGTTAGGC |
| | | CAGCTTGGCACTTGATGTAATTCTCCTTGGAATTTGCCCTTTTTGAGT |
| | | TTGGATCTTGGTTCATTCTCAAGCCTCAGACAGTGGTTCAAAGTTTTT |
| | | TTCTTCCATTTCAGGTGTCGTGA |
| 2 | Leader (aa) | MALPVTALLLPLALLLHAARP |
| 3 | Leader (na) | ATGGCCCTGCCTGTGACAGCCCTGCTGCTGCCTCTGGCTCTGCTGCT |
| | | GCATGCCGCTAGACCC |
| 1938 | Leader (na) | ATGGCCCTCCCTGTCACCGCCCTGCTGCTTCCGCTGGCTCTTCTGCTC |
| | | CACGCCGCTCGGCCC |
| 4 | CD 8 hinge | TTTPAPRPPTPAPTIASQPLSLRPEACRPAAGGAVHTRGLDFACD |
| | (aa) | |
| 5 | CD8 hinge | ACCACGACGCCAGCGCCGCGACCACCAACACCGGCGCCCACCATCG |
| | (na) | CGTCGCAGCCCCTGTCCCTGCGCCCAGAGGCGTGCCGGCCAGCGGC |
| | | GGGGGGCGCAGTGCACACGAGGGGGCTGGACTTCGCCTGTGAT |
| 6 | Ig4 hinge | ESKYGPPCPPCPAPEFLGGPSVFLFPPKPKDTLMISRTPEVTCVVVDVSQ |
| | (aa) | EDPEVQFNWYVDGVEVHNAKTKPREEQFNSTYRVVSVLTVLHQDWLN |
| | | GKEYKCKVSNKGLPSSIEKTISKAKGQPREPQVYTLPPSQEEMTKNQVSL |
| | | TCLVKGFYPSDIAVEWESNGQPENNYKTTPPVLDSDGSFFLYSRLTVDKS |
| | | RWQEGNVFSCSVMHEALHNHYTQKSLSLSLGKM |
| 7 | Ig4 hinge | GAGAGCAAGTACGGCCCTCCCTGCCCCCCTTGCCCTGCCCCCGAGTT |
| | (na) | CCTGGGCGGACCCAGCGTGTTCCTGTTCCCCCCCAAGCCCAAGGACA |
| | | CCCTGATGATCAGCCGGACCCCCGAGGTGACCTGTGTGGTGGTGGA |
| | | CGTGTCCCAGGAGGACCCCGAGGTCCAGTTCAACTGGTACGTGGAC |
| | | GGCGTGGAGGTGCACAACGCCAAGACCAAGCCCCGGGAGGAGCAG |
| | | TTCAATAGCACCTACCGGGTGGTGTCCGTGCTGACCGTGCTGCACCA |
| | | GGACTGGCTGAACGGCAAGGAATACAAGTGTAAGGTGTCCAACAAG |
| | | GGCCTGCCCAGCAGCATCGAGAAAACCATCAGCAAGGCCAAGGGCC |
| | | AGCCTCGGGAGCCCCAGGTGTACACCCTGCCCCCTAGCCAAGAGGA |
| | | GATGACCAAGAACCAGGTGTCCCTGACCTGCCTGGTGAAGGGCTTCT |
| | | ACCCCAGCGACATCGCCGTGGAGTGGGAGAGCAACGGCCAGCCCG |
| | | AGAACAACTACAAGACCACCCCCCCTGTGCTGGACAGCGACGGCAG |
| | | CTTCTTCCTGTACAGCCGGCTGACCGTGGACAAGAGCCGGTGGCAG |
| | | GAGGGCAACGTCTTTAGCTGCTCCGTGATGCACGAGGCCCTGCACA |
| | | ACCACTACACCCAGAAGAGCCTGAGCCTGTCCCTGGGCAAGATG |
| 8 | IgD hinge | RWPESPKAQASSVPTAQPQAEGSLAKATTAPATTRNTGRGGEEKKKEK |
| | (aa) | EKEEQEERETKTPECPSHTQPLGVYLLTPAVQDLWLRDKATFTCFVVGS |
| | | DLKDAHLTWEVAGKVPTGGVEEGLLERHSNGSQSQHSRLTLPRSLWN |
| | | AGTSVTCTLNHPSLPPQRLMALREPAAQAPVKLSLNLLASSDPPEAASW |
| | | LLCEVSGFSPPNILLMWLEDQREVNTSGFAPARPPPQPGSTTFWAWSV |
| | | LRVPAPPSPQPATYTCVVSHEDSRTLLNASRSLEVSYVTDH |
| 9 | IgD hinge | AGGTGGCCCGAAAGTCCCAAGGCCCAGGCATCTAGTGTTCCTACTGC |
| | (na) | ACAGCCCCAGGCAGAAGGCAGCCTAGCCAAAGCTACTACTGCACCT |
| | | GCCACTACGCGCAATACTGGCCGTGGCGGGGAGGAGAAGAAAAAG |
| | | GAGAAAGAGAAAGAAGAACAGGAAGAGAGGGAGACCAAGACCCCT |
| | | GAATGTCCATCCCATACCCAGCCGCTGGGCGTCTATCTCTTGACTCCC |
| | | GCAGTACAGGACTTGTGGCTTAGAGATAAGGCCACCTTTACATGTTT |
| | | CGTCGTGGGCTCTGACCTGAAGGATGCCCATTTGACTTGGGAGGTT |
| | | GCCGGAAAGGTACCCACAGGGGGGGTTGAGGAAGGGTTGCTGGAG |
| | | CGCCATTCCAATGGCTCTCAGAGCCAGCACTCAAGACTCACCCTTCC |
| | | GAGATCCCTGTGGAACGCCGGGACCTCTGTCACATGTACTCTAAATC |
| | | ATCCTAGCCTGCCCCCACAGCGTCTGATGGCCCTTAGAGAGCCAGCC |
| | | GCCCAGGCACCAGTTAAGCTTAGCCTGAATCTGCTCGCCAGTAGTGA |
| | | TCCCCCAGAGGCCGCCAGCTGGCTCTTATGCGAAGTGTCCGGCTTTA |
| | | GCCCGCCCAACATCTTGCTCATGTGGCTGGAGGACCAGCGAGAAGT |
| | | GAACACCAGCGGCTTCGCTCCAGCCCGGCCCCCACCCCAGCCGGGTT |
| | | CTACCACATTCTGGGCCTGGAGTGTCTTAAGGGTCCCAGCACCACCT |
| | | AGCCCCCAGCCAGCCACATACACCTGTGTTGTGTCCCATGAAGATAG |
| | | CAGGACCCTGCTAAATGCTTCTAGGAGTCTGGAGGTTTCCTACGTGA |
| | | CTGACCATT |
| 10 | GS | GGGGSGGGGS |
| | hinge/linker | |
| | (aa) | |
| 11 | GS | GGTGGCGGAGGTTCTGGAGGTGGAGGTTCC |
| | hinge/linker | |
| | (na) | |
| 12 | CD8 TM (aa) | IYIWAPLAGTCGVLLLSLVITLYC |
| 13 | CD8 TM (na) | ATCTACATCTGGGCGCCCTTGGCCGGGACTTGTGGGGTCCTTCTCCT |
| | | GTCACTGGTTATCACCCTTTACTGC |
| 1939 | CD8 TM (na) | ATCTACATTTGGGCCCCTCTGGCTGGTACTTGCGGGGTCCTGCTGCTT |
| | | TCACTCGTGATCACTCTTTACTGT |
| 14 | 4-1BB | KRGRKKLLYIFKQPFMRPVQTTQEEDGCSCRFPEEEEGGCEL |
| | intracellular | |
| | domain (aa) | |
| 15 | 4-1BB | AAACGGGGCAGAAAGAAACTCCTGTATATATTCAAACAACCATTTAT |
| | intracellular | GAGACCAGTACAAACTACTCAAGAGGAAGATGGCTGTAGCTGCCGA |
| | domain (na) | TTTCCAGAAGAAGAAGAAGGAGGATGTGAACTG |
| 1940 | 4-1BB | AAGCGCGGTCGGAAGAAGCTGCTGTACATCTTTAAGCAACCCTTCAT |
| | intracellular | GAGGCCTGTGCAGACTACTCAAGAGGAGGACGGCTGTTCATGCCGG |
| | domain (na) | TTCCCAGAGGAGGAGGAAGGCGGCTGCGAACTG |
| 16 | CD27 (aa) | QRRKYRSNKGESPVEPAEPCRYSCPREEEGSTIPIQEDYRKPEPACSP |
| 17 | CD27 (na) | AGGAGTAAGAGGAGCAGGCTCCTGCACAGTGACTACATGAACATGA |
| | | CTCCCCGCCGCCCCGGGCCCACCCGCAAGCATTACCAGCCCTATGCC |
| | | CCACCACGCGACTTCGCAGCCTATCGCTCC |
| 18 | CD3-zeta | RVKFSRSADAPAYKQGQNQLYNELNLGRREEYDVLDKRRGRDPEMGG |
| | (aa) | KPRRKNPQEGLYNELQKDKMAEAYSEIGMKGERRRGKGHDGLYQGLS |
| | | TATKDTYDALHMQALPPR |
| 19 | CD3-zeta | AGAGTGAAGTTCAGCAGGAGCGCAGACGCCCCCGCGTACAAGCAG |
| | (na) | GGCCAGAACCAGCTCTATAACGAGCTCAATCTAGGACGAAGAGAGG |
| | | AGTACGATGTTTTGGACAAGAGACGTGGCCGGGACCCTGAGATGGG |
| | | GGGAAAGCCGAGAAGGAAGAACCCTCAGGAAGGCCTGTACAATGA |
| | | ACTGCAGAAAGATAAGATGGCGGAGGCCTACAGTGAGATTGGGAT |
| | | GAAAGGCGAGCGCCGGAGGGGCAAGGGGCACGATGGCCTTTACCA |
| | | GGGTCTCAGTACAGCCACCAAGGACACCTACGACGCCCTTCACATGC |
| | | AGGCCCTGCCCCCTCGC |
| 1941 | CD3-zeta | CGCGTGAAATTCAGCCGCAGCGCAGATGCTCCAGCCTACAAGCAGG |
| | (na) | GGCAGAACCAGCTCTACAACGAACTCAATCTTGGTCGGAGAGAGGA |
| | | GTACGACGTGCTGGACAAGCGGAGAGGACGGGACCCAGAAATGGG |
| | | CGGGAAGCCGCGCAGAAAGAATCCCCAAGAGGGCCTGTACAACGA |
| | | GCTCCAAAAGGATAAGATGGCAGAAGCCTATAGCGAGATTGGTATG |
| | | AAAGGGGAACGCAGAAGAGGCAAAGGCCACGACGGACTGTACCAG |
| | | GGACTCAGCACCGCCACCAAGGACACCTATGACGCTCTTCACATGCA |
| | | GGCCCTGCCGCCTCGG |
| 20 | CD3-zeta | RVKFSRSADAPAYQQGQNQLYNELNLGRREEYDVLDKRRGRDPEMGG |
| | (aa) | KPRRKNPQEGLYNELQKDKMAEAYSEIGMKGERRRGKGHDGLYQGLS |
| | | TATKDTYDALHMQALPPR |
| 21 | CD3-zeta | AGAGTGAAGTTCAGCAGGAGCGCAGACGCCCCCGCGTACCAGCAG |
| | (na) | GGCCAG |
| | | AACCAGCTCTATAACGAGCTCAATCTAGGACGAAGAGAGGAGTACG |
| | | ATGTTT |
| | | TGGACAAGAGACGTGGCCGGGACCCTGAGATGGGGGGAAAGCCGA |
| | | GAAGGA |
| | | AGAACCCTCAGGAAGGCCTGTACAATGAACTGCAGAAAGATAAGAT |
| | | GGCGG |
| | | AGGCCTACAGTGAGATTGGGATGAAAGGCGAGCGCCGGAGGGGCA |
| | | AGGGGC |
| | | ACGATGGCCTTTACCAGGGTCTCAGTACAGCCACCAAGGACACCTAC |
| | | GACGC |
| | | CCTTCACATGCAGGCCCTGCCCCCTCGC |
| 22 | linker | GGGGS |
| 23 | linker | GGTGGCGGAGGTTCTGGAGGTGGAGGTTCC |
| 24 | PD-1 | Pgwfldspdrpwnpptfspallvvtegdnatftcsfsntsesfvlnwyrmspsnqtdkl |
| | extracellular | aafpedrsqpgqdcrfrvtqlpngrdfhmsvvrarrndsgtylcgaislapkaqikeslra |
| | domain (aa) | elrvterraevptahpspsprpagqfqtlv |
| 25 | PD-1 | Cccggatggtttctggactctccggatcgcccgtggaatcccccaaccttctcaccggcact |
| | extracellular | cttggttgtgactgagggcgataatgcgaccttcacgtgctcgttctccaacacctccgaat |
| | domain (na) | cattcgtgctgaactggtaccgcatgagcccgtcaaaccagaccgacaagctcgccgcgtt |
| | | tccggaagatcggtcgcaaccgggacaggattgtcggttccgcgtgactcaactgccgaat |
| | | ggcagagacttccacatgagcgtggtccgcgctaggcgaaacgactccgggacctacctg |
| | | tgcggagccatctcgctggcgcctaaggcccaaatcaaagagagcttgagggccgaactg |
| | | agagtgaccgagcgcagagctgaggtgccaactgcacatccatccccatcgcctcggcct |
| | | gcggggcagtttcagaccctggtc |
| 26 | PD-1 CAR | Malpvtalllplalllhaarppgwfldspdrpwnpptfspallvvtegdnatftcsfsntse |
| | (aa) with | sfvlnwyrmspsnqtdklaafpedrsqpgqdcrfrvtqlpngrdfhmsvvrarrndsgt |
| | signal | ylcgaislapkaqikeslraelrvterraevptahpspsprpagqfqtlvtttpaprpptpa |
| | | ptiasqplslrpeacrpaaggavhtrgldfacdiyiwaplagtcgvlllslvitlyckrgrkklly |
| | | ifkqpfmrpvqttqeedgcscrfpeeeeggcelrvkfsrsadapaykqgqnqlynelnl |
| | | grreeydvldkrrgrdpemggkprrknpqeglynelqkdkmaeayseigmkgerrrg |
| | | kghdglyqglstatkdtydalhmqalppr |
| 27 | PD-1 CAR | Atggccctccctgtcactgccctgcttctccccctcgcactcctgctccacgccgctagacca |
| | (na) | cccggatggtttctggactctccggatcgcccgtggaatcccccaaccttctcaccggcact |
| | | cttggttgtgactgagggcgataatgcgaccttcacgtgctcgttctccaacacctccgaat |
| | | cattcgtgctgaactggtaccgcatgagcccgtcaaaccagaccgacaagctcgccgcgtt |
| | | tccggaagatcggtcgcaaccgggacaggattgtcggttccgcgtgactcaactgccgaat |
| | | ggcagagacttccacatgagcgtggtccgcgctaggcgaaacgactccgggacctacctg |
| | | tgcggagccatctcgctggcgcctaaggcccaaatcaaagagagcttgagggccgaactg |
| | | agagtgaccgagcgcagagctgaggtgccaactgcacatccatccccatcgcctcggcct |
| | | gcggggcagtttcagaccctggtcacgaccactccggcgccgcgcccaccgactccggcc |
| | | ccaactatcgcgagccagcccctgtcgctgaggccggaagcatgccgccctgccgccgga |
| | | ggtgctgtgcatacccggggattggacttcgcatgcgacatctacatttgggctcctctcgc |
| | | cggaacttgtggcgtgctccttctgtccctggtcatcaccctgtactgcaagcggggtcgga |
| | | aaaagcttctgtacattttcaagcagcccttcatgaggcccgtgcaaaccacccaggagga |
| | | ggacggttgctcctgccggttccccgaagaggaagaaggaggttgcgagctgcgcgtgaa |
| | | gttctcccggagcgccgacgcccccgcctataagcagggccagaaccagctgtacaacga |
| | | actgaacctgggacggcgggaagagtacgatgtgctggacaagcggcgcggccgggacc |
| | | ccgaaatgggcgggaagcctagaagaaagaaccctcaggaaggcctgtataacgagctg |
| | | cagaaggacaagatggccgaggcctactccgaaattgggatgaagggagagcggcgga |
| | | ggggaaaggggcacgacggcctgtaccaaggactgtccaccgccaccaaggacacatac |
| | | gatgccctgcacatgcaggcccttccccctcgc |
| 28 | linker | (Gly-Gly-Gly-Ser)n, where n = 1-10 |
| 29 | linker | (Gly4 Ser)4 |
| 30 | linker | (Gly4 Ser)3 |
| 31 | linker | (Gly3Ser) |
| 39 | PD1 CAR | Pgwfldspdrpwnpptfspallvvtegdnatftcsfsntsesfvlnwvrmspsnqtdkl |
| | (aa) | aafpedrsqpgqdcrfrvtqlpngrdfhmsvvrarrndsgtvlcgaislapkaqikeslra |
| | | elrvterraevptahpspsprpagqfqtlvtttpaprpptpaptiasqplslrpeacrpaa |
| | | ggavhtrgldfacdiyiwaplagtcgvlllslvitlyckrgrkkllyifkqpfmrpvqttqeed |
| | | gcscrfpeeeeggcelrvkfsrsadapaykqgqnqlynelnlgrreeydvldkrrgrdpe |
| | | mggkprrknpqeglynelqkdkmaeayseigmkgerrrgkghdglyqglstatkdty |
| | | dalhmqalppr |

### EXAMPLES

### Example 1

[1330] Identification of genes important in naive T cell, e.g., T_{SCM} cell, proliferation and expansion. Next generation sequencing on T cells transduced with a barcoded shRNA library was conducted to find genes that, when inhibited through shRNA, promoted the expansion of naive T cells, e.g., m T_{SCM} cells. On target, LSD1, emerged as a gene which, when inhibited, resulted in a more naive T cell phenotype. The effects of LSD1 inhibition on T cell, e.g., CAR T cell, phenotype and/or function were investigated further, as described below.

### FL-LSD1 LC-MS Assay

[1331] Representative compounds of the present disclosure were serially and separately diluted 3-fold in DMSO to obtain a total of twelve concentrations. Then the test compounds at each concentration (100 nL of each) were transferred into a 384-well Perkin Elmer ProxiPlate 384 plus plates by Mosquito™ Solutions (5 μL) of 0.8 nM, the full-length LSD1 and 0.5 pM FAD in reaction buffer (40 mM Tris-HCl, 0.01% Triton-X100.10 mM KCl, 1 mM DTT) were added into the wells and then incubated with the test compound for 30 min. A 5 pL solution of 1 pM of the peptide substrate H3K4me1 (histone H3[1-21]-biotin) in reaction buffer was added to each initiate reaction. The final components in the reaction solution include 0.4 nM FL-LSD1, 0.25 pM FAD, and 0.5 pM H3K4me1 peptide with varying concentration of the compounds. A positive control consisted of the enzyme, 0.25 pM FAD and 0.5 pM substrate in the absence of the test compound, and a negative control consisted of 0.5 pM substrate only. Each reaction was incubated at room temperature for 60 min, and then stopped by the addition of 3 pL quench solution (2.5% TFA with 320 nM d4-SAH). The reaction mixture was centrifuged (Eppendorf centrifuge 5810, Rotor A-4-62) for 1 min at 2000 rpm and read on an API 4000 triple quadrupole mass spec with Turbulon Spray (Applied Biosystem) coupled with Prominence UFLC (Shimadzu). The conversion ratio of H3K4me 1 substrate to the H3K4me0 product was calculated by dividing the peak area of the H3K4me0 peptide by the total peak area of all those two peptides on the assumption that the ionization efficiency of those peptides is the same. The data were then fit to a dose response equation using the program Helios to get the IC50 values of the test compound. IC50 values determined according to this method are presented in Table 3.

### Example 2

### Preparation of 5-(6-chloro-4′-(methylsulfonyl)biphenyl-3-yl)-2-(piperazin-1-yl)-1H-pyrrole-3-carbonitrile (1)

[chemical structure]

### Preparation of Intermediate 2-bromo-1-(3-bromo-4-chlorophenyl)ethanone (1b)

[chemical structure]

[1332] To a solution of 1-(3-bromo-4-chlorophenyl)ethanone (0.4 g, 1.713 mmol) (la) in mixture of EtOAc (10 mL) and CHCl₃ (10.00 ml) was added copper(II) bromide (0.689 g, 3.08 mmol). The reaction mixture was heated at reflux and stirred for 3 h. After cooling to rt, the mixture was added with 10 mL of NH4Cl(aq), and extracted with EtOAc (20 mL×2). The combined organic phase was washed with brine (20 mL), dried over Na₂SO₄ (anhydrous), filtered and concentrated under reduced pressure. The residue was purified by flash chromatography (EA/PE=0:100-3:100) to give the title compound (0.23 g, 50%). ¹H NMR (400 MHz, CDCl₃) δ ppm 4.39 (s, 2H), 7.52-7.65 (m, 1H), 7.79-7.96 (m, 1H), 8.14-8.37 (m, 1H).

### Preparation of Intermediate tert-butyl 4-(5-(3-bromo-4-chlorophenyl)-3-cyano-1H-pyrrol-2-yl)piperazine-1-carboxylate (1c)

[chemical structure]

[1333] To a solution of (E)-tert-butyl 4-(1-amino-2-cyanovinyl)piperazine-1-carboxylate (242 mg, 0.960 mmol) in anhydrous EtOH (6 ml) was added 2-bromo-1-(3-bromo-4-chlorophenyl)ethanone (300 mg, 0.960 mmol) (1b) and sodium hydrogencarbonate (323 mg, 3.84 mmol). The reaction mixture was heated at reflux and stirred for 3 h. After cooling to rt, the mixture was diluted with 10 mL of NH₄Cl(aq), and extracted with EtOAc (20 mL×2). The combined organic phase was washed with brine (30 mL), dried over Na₂SO₄ (anhydrous), filtered and concentrated under reduced pressure. The residue was purified by flash chromatography (EA/PE=0:100-20:80) to give the title compound (180 mg, 36%). LC-MS: [M+H]⁺=467.0.

### Preparation of Intermediate tert-butyl 4-(5-(6-chloro-4′-(methylsulfonyl)biphenyl-3-yl)-3-cyano-1H-pyrrol-2-yl)piperazine-1-carboxylate (1d)

[chemical structure]

[1334] To a solution of tert-butyl 4-(5-(3-bromo-4-chlorophenyl)-3-cyano-1H-pyrrol-2-yl)piperazine-1-carboxylate (50 mg, 0.107 mmol) (1c) in mixture of H₂O (0.050 ml) and n-propanol (0.5 ml) was added 4-(methylsulfonyl)phenylboronic acid (42.9 mg, 0.215 mmol), PdCl₂(PPh₃) (7.56 mg, 10.73 μmol), Na₂CO₃ (28.4 mg, 0.268 mmol). The reaction mixture was heated at 100° C. for 1 h under N₂ with microwave. After cooling to rt, the mixture was diluted with 5 mL of NH₄Cl(aq), and extracted with EtOAc (10 mL×2). The combined organic phase was washed with brine (10 mL), dried over Na₂SO₄ (anhydrous), filtered and concentrated under reduced pressure. The residue was purified by flash chromatography (EA/PE=0:100-35:65) to give the title compound (40 mg, 62%). ¹H NMR (400 MHz, CDCl₃) δ ppm 1.47 (s, 9H), 3.08 (s, 3H), 3.33 (br s., 4H), 3.53 (t, J=4.89 Hz, 4H), 6.26-6.67 (m, 1H), 7.38-7.53 (m, 3H), 7.66 (d, J=8.28 Hz, 2H), 7.92 (d, J=8.28 Hz, 2H), 8.87-9.05 (m, 1H).

### Preparation of 5-(6-chloro-4′-(methylsulfonyl)biphenyl-3-yl)-2-(piperazin-1-yl)-1H-pyrrole-3-carbonitrile (1)

[chemical structure]

[1335] A mixture of tert-butyl 4-(5-(6-chloro-4′-(methylsulfonyl)biphenyl-3-yl)-3-cyano-1H-pyrrol-2-yl)piperazine-1-carboxylate (ld) (30 mg, 0.055 mmol) and HCl in EtOAc (2 ml, 2.000 mmol) was stirred at 25° C. for 1 h. The precipitate was filtered and washed by EtOAc to afford desired product (25 mg, 97%). ¹H NMR (400 MHz, MeOD-d₄) δ ppm 3.20 (s, 3H), 3.39-3.42 (m, 4H), 3.64-3.66 (m, 4H), 6.67 (s, 1H), 7.53 (d, J=8.68 Hz, 1H), 7.60-7.63 (m, 2H), 7.74-7.76 (m, 2H), 8.06 (d, J=8.20 Hz, 2H). LC-MS: [M+H]⁺=441.1.

### Example 3

### Preparation of N,N-dimethyl-1-((4-(4-(4-(piperidin-4-yl)phenyl)-1H-indazol-1-yl)phenyl)sulfonyl)piperidin-4-amine (2)

[chemical structure]

### Preparation of Intermediate tert-butyl 4-(4-(4,4,5,5-tetramethyl-1,3,2-dioxaborolan-2-yl)phenyl)piperidine-1-carboxylate (2a)

[chemical structure]

[1336] A mixture of tert-butyl 4-(4-bromophenyl) piperidine-1-carboxylate (510 mg, 1.499 mmol), 4,4,4′,4′,5,5,5′,5′-octamethyl-2,2′-bi(1,3,2-dioxaborolane) (761 mg, 3 mmol) and KOAc (441 mg, 4.5 mmol) in DME (20 ml) was degassed with N₂ and PdCl₂(dppf)-CH₂Cl₂ (122 mg, 0.15 mmol) was added. The resulting mixture was degassed with N₂ again and was heated to 80° C. overnight. After cooling to rt, the mixture was added with 10 mL of NH₄Cl(aq), and extracted with EtOAc (20 mL×2). The combined organic phase was washed with brine (20 mL), dried over Na₂SO₄ (anhydrous), filtered and concentrated under reduced pressure. The residue was purified by flash chromatography (EA/Hexane=0:100-1:5) to give the title compound (500 mg, 86%). ¹H NMR (400 MHz, CDCl₃) δ ppm 1.27 (s, 9H), 1.34 (s, 12H), 1.57-1.72 (m, 2H), 1.82 (br d, J=13.05 Hz, 2H), 2.66 (br s, 1H), 2.80 (br t, J=12.05 Hz, 2H), 4.25 (br d, J=12.80 Hz, 2H), 7.11-7.42 (m, 2H), 7.77 (d, J=8.03 Hz, 2H). LC-MS: [M+H-100]⁺=288.2.

### Preparation of Intermediate 1-((4-iodophenyl)sulfonyl)-N,N-dimethylpiperidin-4-amine (2b)

[chemical structure]

[1337] To a solution of 4-iodobenzene-1-sulfonyl chloride (2 g, 6.61 mol) and N,N-dimethylpiperidin-4-amine (0.848 g, 6.61 mmol) in DCM (20 ml) was added TEA (1.115 ml, 7.93 mmol). The mixture was stirred at rt for 3 h. LC-MS indicated the reaction was complete. The mixture was concentrated. The residue was purified by flash chromatography (MeOH: DCM=0:100 to 10:100) to give the title compound (2.85 g, 98%) as a white solid. ¹H-NMR (400 MHz, MeOD-d4) δ ppm 1.38-1.61 (m, 2H), 1.86 (br d, J=11.80 Hz, 2H), 2.19-2.56 (m, 6H), 3.01 (br d, J=6.53 Hz, 3H), 3.61 (br d, J=11.80 Hz, 2H), 7.49 (d, J=8.53 Hz, 2H), 8.02 (s, 2H). LC-MS: [M+H]⁺=394.9.

### Preparation of Intermediate 1-((4-(4-bromo-1H-indazol-1-yl)phenyl)sulfonyl)-N,N-dimethylpiperidin-4-amine (2c)

[chemical structure]

[1338] A mixture of 1-((4-iodophenyl)sulfonyl)-N,N-dimethylpiperidin-4-amine (2b) (550 mg, 1.255 mmol), 4-bromo-1H-indazole (297 mg, 1.507 mmol) and K₂CO₃ (521 mg, 3.77 mmol) in DMSO (10 ml) was degassed with N₂ and L-Proline (116 mg, 1.004 mmol) and CuI (96 mg, 0.502 mmol) was added. The resulting mixture was degassed with N₂ again and was heated to 105° C. for 18 h. After cooling to rt, the mixture was added with 10 mL of NH₄Cl(aq), and extracted with EtOAc (20 mL×2). The combined organic phase was washed with brine (20 mL), dried over Na₂SO₄ (anhydrous), filtered and concentrated under reduced pressure. The residue was purified via prep-HPLC to give the title compound (170 mg, 29.2%) as a white solid. LC-MS: [M+H]⁺=463.0; [M+H+2]⁺=465.0.

### Preparation of Intermediate tert-butyl 4-(4-(1-(4-((4-(dimethylamino)piperidin-1-yl)sulfonyl)phenyl)-1H-indazol-4-yl)phenyl)piperidine-1-carboxylate (2d)

[chemical structure]

[1339] To a mixture of tert-butyl 4-(4-(4,4,5,5-tetramethyl-1,3,2-dioxaborolan-2-yl)phenyl)piperidine-1-carboxylate (2a) (251 mg, 0.647 mmol), 1-((4-(4-bromo-1H-indazol-1-yl)phenyl)sulfonyl)-N,N-dimethylpiperidin-4-amine (2c) (200 mg, 0.432 mmol) and K₂CO₃ (179 mg, 1.295 mmol) in a mixture of dioxane (8 mL) and H₂O (1.6 mL) was added PdCl₂(dppf)·CH₂Cl₂ adduct (35.2 mg, 0.043 mmol) with N₂ atmosphere. The reaction mixture was heated at 100° C. under microwave for 30 min. After cooling to rt, the mixture was added with 10 mL of NH4Cl(aq), and extracted with EtOAc (20 mL×2). The combined organic phase was washed with brine (20 mL), dried over Na₂SO₄ (anhydrous), filtered and concentrated under reduced pressure. The residue was purified via prep-HPLC to give the title compound (120 mg, 43.2%) as a white solid. LC-MS: [M+H]⁺=644.3.

### Preparation of N,N-dimethyl-1-((4-(4-(4-(piperidin-4-yl)phenyl)-1H-indazol-1-yl)phenyl)sulfonyl)piperidin-4-amine (2)

[chemical structure]

[1340] To a solution of tert-butyl 4-(4-(1-(4-((4-(dimethylamino)piperidin-1-yl)sulfonyl)phenyl)-1H-indazol-4-yl)phenyl)piperidine-1-carboxylate (2d) (490 mg, 0.761 mmol) in DCM (20 mL) was added 1 M of HCl in EtOAc (10 mL). The mixture was stirred at 40° C. for 3 h. The mixture was concentrated and dried on vacuum to give the title compound (486 mg, 96%). ¹H NMR (400 MHz, DMSO) δ ppm 1.67-1.78 (m, 2H), 1.87-2.15 (m, 6H), 2.37 (t, J=11.42 Hz, 2H), 2.66 (d, J=4.52 Hz, 6H), 2.89-3.11 (m, 3H), 3.19 (br s., 1H), 3.40 (d, J=12.55 Hz, 2H), 3.85 (d, J=11.54 Hz, 2H), 7.44 (d, J=7.78 Hz, 2H), 7.66 (t, J=7.91 Hz, 1H), 7.75 (d, J=8.03 Hz, 2H), 7.92-8.04 (m, 3H), 8.13 (d, J=8.53 Hz, 2H), 8.56 (s, 1H) 8.73-8.89 (m, 1H) 10.52 (br s, 1H). LC-MS: [M+H]⁺=544.2.

### Example 4—Investigations of LSD1 Inhibitors

### Generation of CAR19 Lentiviral Constructs

[1341] The scFvs used in the CAR19 constructs that were assessed in the Examples were independently synthesized based on an anti-CD19 scFV sequence (as described in WO2012/079000). The scFV was cloned in a light-to-heavy chain direction, with a flexible linker connecting the VL and VH domains, into a vector backbone containing the CD8 hinge region along with the 4-1BB molecule and the CD3zeta molecule.

### Cell Lines and Cell Transduction

[1342] Human T cells were transduced by spinoculation with lentiviral supernatant from 293T cells transfected with CAR19 plasmid DNA.

### Cancer Cells

[1343] NALM6 and K562 cell lines were obtained from the ATCC and maintained in media according to supplier's recommendations. To produce a bioluminescent model for T cell killing assays, all cells were transduced with a luciferase lentiviral construct and kept under antibiotic selection.

### Flow Cytometry

[1344] Cells were isolated from in vitro culture, washed once in MACS+0.5% BSA buffer, and stained on ice using either biotinylated Protein L followed by incubated with a fluorochrome-conjugated streptavidin reagent or an antibody recognizing the given target antigen. In all analyses, the population of interest was gated based on forward vs side scatter characteristics, followed by singlet gating, and live cells were gated. Flow cytometry was performed on a four laser Fortessa (Becton-Dickinson).

### Compound Treatments

[1345] In all instances, compounds were either resuspended in either water (H₂O) or DMSO, depending on compound solubility. In all instances compounds were added throughout the T cell culture, and T cells were washed extensively prior to assay. Compounds and concentrations used were 5 ng/mL IL-7 and ng/mL IL-15 (recombinant protein; Peprotech), 5 μM TWS119 (also referred to as GSK3bi or GSK3p-i) (GSK3-beta inhibitor; CAS Number 601514-19-6; Cayman), 1 μM Akt I/IIi (also referred to as AKTi or AktI/II inh) (Akt Inhibitor VIII, Isozyme-Selective, Akti-1/2; EMD Millipore), 100 nM LSD1i-GSK (GSK-LSD1 inhibitor, CAS Number 1431368-48-7, Sigma), 200 nM LSD1i-EMD (LSD1 Inhibitor IV, RN-1, HCl; EMD Millipore) 100 nM Compound A (LSD1 inhibitor; Novartis), 100 nM Compound B (LSD1 inhibitor; Novartis), or 100 nM Compound C (LSD1 inhibitor; Novartis) were used. In the figures, “control” refers to vehicle with no additional compound added. IL7/IL15, TWS119, and Akt I/Iii are published compounds known in the art to expand T_{SCM} T cells (IL7/IL15: Xu et al, Blood. 2014; 123(24):3750-9; AKTi: Crompton et al., Cancer Res. 2015; 75(2):296-305, and van der Waart et al, Blood, 2014; 124(23):3490-500; TWS119: Gattoni et al., Nature Medicine, 2011; 17(10):1290-129).

### Killing Assay

[1346] T cell killing was directed towards CAR19-expressing NALM6 cell lines stably expressing luciferase. Untransduced cells (UTD) and a non-targeting isotype control scFV CART (IsoCAR) were used to determine non-specific background killing levels. The cytolytic activities of CAR19 were measured as a titration of effector:target cell ratios of 10:1 and 2-fold downward dilutions of T cells where effectors were defined as total T cells, and percentages of CAR bearing T cells were normalized by addition of UTD T cells. Assays were initiated by mixing an appropriate number of T cells with a constant number of targets cells. After 20 hours luciferase signal was measured using the Bright-Glo™ Luciferase Assay on the EnVision instrument. Loss of luciferase activity indicates specific killing.

### Cytokine Secretion

[1347] T cell killing was directed towards CAR19-expressing NALM6 cell lines stably expressing luciferase. Untransduced cells (UTD) and a non-targeting isotype control scFV CART (IsoCAR) were used to determine non-specific background cytokine levels. Effector and target cells were incubated at a 3:1 ratio in RPMI containing 10% FBS for 18 hours. Supernatant was analysed by 3-plex array according the manufacturer's instructions (Invitrogen).

### Proliferation Assay

[1348] CAR19 T cells were tested for their ability to proliferate in response to exposure to antigen on target cells. Target cells included NALM6, Raji, and K5624 cells. Untransduced T cells (UTD) and a non-targeting isotype control scFV CART (IsoCAR) were used as non-specific controls for background T cell effects. On the day of assay (Day 0), target cells were counted and transferred to a 50 ml tube in 6 mL of T cell media at 3e6 cells/ml. Target cells were irradiated on ice at 10,000 rad. After irradiation, target cells were washed twice in T cell media, counted, and resuspended to 5e5 cells/ml in T cell media on ice.

[1349] Frozen transduced T cells were thawed, washed in 10 mL complete T cell media, spun at 300 g for 10 min, and resuspended gently in 3 mL of complete T cell media at RT. T-cells were then counted in a cellometer and resuspended to 2.5e6/mL in 10 mL of media. In a 96 well U-bottom plate, 25,000 irradiated target cells and 25,000 transduced CAR T cells (1:1 ratio) were combined in duplicate wells. In a separate well, 75,000 Anti-CD3/CD28 beads were added in 100 μl of medium to 25,000 transduced T cells to create a 1:3 cells-to-beads ratio as positive control; in another well, 100 μl of medium was added to 25,000 transduced T cells alone as media-only control. Cells were incubated for 4 days at 37° C., 5% CO2.

[1350] On day 4, cells were harvested and duplicates were combined by pipetting and transferring into the same well on the U-bottom plate for staining for FACS of CD3 and CAR using protein L. After staining, cells were resuspended in 120 d MACS+0.5% BSA buffer and 20 μl/well countbright beads were added to each well. Proliferation was measured as the number of FACS positive cells detected in the period of time used to count 2500 beads.

### Results

Inhibition of LSD1 by shRNA Promotes the Expansion of T_{SCM} Cells

[1351] T cells were isolated by negative selection and expanded with anti-CD3/CD28 beads at a 3:1 ratio for 10 days. On day 1, T cells were transduced with lentiviral expression vectors containing LSD1 shRNA targeting sequences that co-expressed the fluorescent protein mCherry. Following expansion, T cell phenotypes of mCherry+ T cells were assessed by flow cytometry. LSD1 inhibition significantly enhanced the percentage of naive (Tn) and stem-like memory cells (T_{SCM}) cells in CD8+ (FIG. 1) and CD4+ (FIG. 2) T cells relative to controls with scrambled shRNA sequence.

[1352] The results are shown for CD8+ T cells in FIG. 1. When CD8+ T cells were expanded normally, approximately 10% of the resulting T cells are positive for a T_{SCM} phenotype (CD45RA+CD62L+CCR7+CD27+CD95+). In contrast, when CD8+ T cells transfected with DNA encoding shRNA molecules to LSD11A, 1B or 2, the resulting T cell population was enriched in T_{SCM}(e.g., CD45RA+CD62L+CCR7+CD27+CD95+), with nearly 50% of the cells having the T_{SCM} (e.g., CD45RA+CD62L+CCR7+CD27+CD95+) phenotype.

[1353] The results are shown for CD4+ T cells in FIG. 2. When CD4+ T cells were expanded normally, less than 2% of the resulting T cells are positive for a T_{SCM} phenotype (CD45RA+CD62L+CCR7+CD27+CD95+). In contrast, when CD4+ T cells transfected with DNA encoding shRNA molecules to LSD11A, 1B or 2, the resulting T cell population was enriched in T_{SCM}(e.g., CD45RA+CD62L+CCR7+CD27+CD95+), with, in the case of shRNA 1B, up to 20% of the T cells having the T_{SCM} (e.g., CD45RA+CD62L+CCR7+CD27+CD95+) phenotype.

TABLE 4

| | SEQ | |
|---|---|---|
| Name | ID NO: | Sequence Encoding shRNA |
| Scramble 1 | 123 | GCCGGCAGCTAGCGACGCCATCTCGAGATGGCGTCGCTAGCTGCCGGCTTTTTTGA |
| Scramble 2 | 124 | CCTAAGGTTAAGTCGCCCTCGCTCGAGCGAGGGCGACTTAACCTTAGGTTTTTTGA |
| LSD1 1A | 125 | CGGTTGCTAGAAGCTACATCTGTTAATATTCATAGCAGATGTAGCTTCTAGCAACCGTTTTTTGA |
| LSD1 1B | 126 | CGGTTGCTAGAAGTTACATTTGTTAATATTCATAGCAGATGTAGCTTCTAGCAACCGTTTTTTGA |
| LSD1 2 | 127 | CAGAAGGCCTAGACATTAAACCTCGAGGTTTAATGTCTAGGCCTTCTGTTTTTTGA |
| LSD1 3A | 128 | GCCACATTTCGCAAAGGAAACGTTAATATTCATAGCGTTTCCTTTGCGAAATGTGGCTTTTTTGA |
| LSD1 3B | 129 | GCCACATTTCGTAAAGGAAATGTTAATATTCATAGCGTTTCCTTTGCGAAATGTGGCTTTTTTGA |
| LSD1 4 | 130 | CGGACAAGCTGTTCCTAAAGACTCGAGTCTTTAGGAACAGCTTTGTCCGTTTTTTGA |
| LSD1 6A | 131 | CGAGTTGCCACATTTCGCAAAGTTAATATTCATAGCTTTGCGAAATGTGGCAACTCGTTTTTTGA |

### Inhibition of LSD1 by Small Molecules Promotes the Expansion of T_{SCM} Cells

[1354] The ability of the indicated compounds to produce T cells of a given phenotype was assessed. Naive human T cells were isolated by negative selection and expanded with anti-CD3/CD28 beads at a 3:1 ratio for 10 days in the presence of the indicated compounds. Compounds were refreshed every 2 days. Following expansion, T cell phenotypes were determined by FACS staining. LSD1 inhibition significantly enhanced the percentage of T_{SCM} cells and limits the percentage of T_{EM} cells in CD4+ (FIG. 3A) and CD8+ (FIG. 3B) T cells relative to controls and relative to other molecules believed in the art to affect T_{SCM} proliferation.

Inhibition of LSD1 by Small Molecules Promotes a Superior Ratio of T_{SCM} to T_{EM} T Cells

[1355] The ability of the indicated compounds to produce T cells of a given phenotype was assessed. Naive human T cells were isolated by negative selection and expanded with anti-CD3/CD28 beads at a 3:1 ratio for 10 days in the presence of the indicated compounds. Compounds were refreshed every 2 days. Following expansion, T cell phenotypes were determined by FACS staining. LSD1 inhibition promotes a ratio of T_{SCM} to T_{EM} consistent with superior T functionality in CD4+ (FIG. 4A) and CD8+ (FIG. 4B) T cells relative to controls and relative to other molecules believed in the art to affect T_{SCM} proliferation.

### Expansion of T Cells in the Presence of LSD1 Inhibition

[1356] The ability of T cells to expand in the presence of the indicated compounds was assessed. Naive human T cells were isolated by negative selection and expanded with anti-CD3/CD28 beads at a 3:1 ratio for 10 days in the presence of the indicated compounds. Compounds were refreshed every 2 days. Following expansion, T cell numbers were counted and the fold expansion relative to day 1 was assessed. LSD1 inhibition does not significantly impair T cell expansion relative to controls and relative to other molecules believed in the art to affect T_{SCM} proliferation (FIG. 5).

### Expression of Checkpoint Receptors in T Cells

[1357] Without being bound by theory, it is believed that co-expression of multiple checkpoint receptors is associated with T cell dysfunction. The ability of the indicated compounds to reduce the expression of checkpoint receptor on T cells was assessed. Naive human T cells were isolated by negative selection and expanded with anti-CD3/CD28 beads at a 3:1 ratio for 10 days in the presence of the indicated compounds. Compounds were refreshed every 2 days. Following expansion, T cell phenotypes were determined by FACS staining. LSD1 inhibition reduces the coexpression of PD1, Tim3, and LAG3 on T cells relative to controls (FIG. 6).

### No Effect of LSD1 Inhibition on CART19 Cell Expression

[1358] Total human T cells were isolated by negative selection and expanded with anti-CD3/CD28 beads at a 3:1 ratio for 10 days in the presence of the indicated compounds. Compounds were refreshed every 2 days. Following expansion, CAR19 expression was determined by FACS staining with Protein L. LSD1 inhibition has no effect on CAR19 expression (FIG. 7).

No effect of LSD1 inhibition on CD8+ and CD4+ T cell proportions

[1359] Total human T cells were isolated by negative selection and expanded with anti-CD3/CD28 beads at a 3:1 ratio for 10 days in the presence of the indicated compounds. Compounds were refreshed every 2 days. Following expansion, the percentage of CD4+ and CD8+ T cells were assessed determined by flow cytometry. LSD1 inhibition has no effect on the percentages of CD4+ and CD8+ T cells in either untransduced controls (UTD) or CAR19 transduced T cells (FIG. 8).

### No Effect of LSD1 Inhibition on the Expansion of CART19 Cells

[1360] Total human T cells were isolated by negative selection and expanded with anti-CD3/CD28 beads at a 3:1 ratio for 10 days in the presence of the indicated compounds. Compounds were refreshed every 2 days. Following expansion, T cell numbers were counted and the fold expansion relative to day 1 was assessed. CAR19 T cells are able to expand ex vivo in the presence of LSD1 inhibitors, indicating that LSD1 inhibition does not significantly impair T cell expansion in either untransduced controls (UTD) or CAR19 transduced T cells (FIG. 9).

LSD1 Inhibition Enhances Cytokine Production from CART19

[1361] T cells were isolated by negative selection and expanded with anti-CD3/CD28 beads at a 3:1 ratio for 10 days in the presence of the indicated compounds or without treatment (control). T cells were transduced with an anti-CD19 scFV on day 1. Compounds were refreshed every 2 days until day 10 was washed out prior to functional assays, then T cells were frozen. T cells were thawed and incubated with NALM6 cells for 20 hrs. Supernatants were harvested and analyzed by cytokine bead array. LSD1 inhibition significantly enhances cytokine production from CAR19 T cells (FIG. 10).

### LSD1 Inhibition Enhances Proliferation of CART19 Cells

[1362] T cells were isolated by negative selection and expanded with anti-CD3/CD28 beads at a 3:1 ratio for 10 days in the presence of the indicated compounds or without treatment (control). T cells were transduced with an anti-CD19 scFV on day 1. Compounds were refreshed every 2 days until day 10 was washed out prior to functional assays, then T cells were frozen. T cells were then thawed and mixed with CD19+ tumor cells lines NALM6 and Raji, as well as CD19− tumor cell line K562. Tumor cells were irradiated and T cells and tumor cells were mixed at a 1:1 ratio. On day 4 following incubation, T cells were stained for CAR using Protein L and CAR⁺ T cell numbers were determined by FACS using countbright beads. Proliferation was measured as the number of FACS positive cells detected in the period of time used to count 2500 beads. Data expressed as fold no target control (K562). LSD1 inhibition enhances the proliferative capacity of CAR19 T cells against CD19+ tumor targets (FIG. 11). Effect of LSD1 Inhibition on Killing Capacity of CART19 Cells

[1363] T cells were isolated by negative selection and expanded with anti-CD3/CD28 beads at a 3:1 ratio for 10 days in the presence of the indicated compounds or without treatment (control). T cells were transduced with an anti-CD19 scFV on day 1. Compounds were refreshed every 2 days until day 10 was washed out prior to functional assays, then T cells were frozen. T cells were thawed and incubated with the indicated luciferized cell line targets for 20 hrs. Percent killing was determined by analysis of remaining luciferase activity. These data demonstrate that LSD1 inhibition can increase killing capacity of CAR19 T cells at low E:T ratios, but does not have a significant impact on killing capacity at higher E:T ratios (FIG. 12)

### Inhibition of LSD1 Promotes Enhances CART19 Cells Efficacy In Vivo

[1364] T cells were isolated by negative selection and expanded with anti-CD3/CD28 beads at a 3:1 ratio for 10 days in the presence of the indicated compounds or without treatment (control). T cells were transduced with an anti-CD19 scFV on day 1. Compounds were refreshed every 2 days until day 10 was washed out prior to functional assays, then T cells were frozen. T cells were thawed and injected once into mice bearing established luciferized NALM6 tumors. Doses indicated represent the number of total CAR⁺ cells injected. These data demonstrate that inhibition of LSD1 during the course of expansion in vitro can significantly enhance the anti-tumor effector function of CAR19 T cells in vivo (FIG. 13).

### Multiple LSD1 Inhibitors Promote the Expansion of T_{SCM} Cells

[1365] T cells were isolated by negative selection and expanded with anti-CD3/CD28 beads at a 3:1 ratio for 10 days in the presence of the indicated compounds or without treatment (control). Compounds were refreshed every 2 days. Following expansion, T cell phenotypes were determined by flow cytometry. LSD1 inhibition with multiple inhibitors can significantly enhance the percentage of T_{SCM} cells in CD4+ (FIG. 14A) and CD8+ (FIG. 14B) T cells relative to controls.

### Expression of Checkpoint Receptors in T Cells

[1366] T cells were isolated by negative selection and expanded with anti-CD3/CD28 beads at a 3:1 ratio for 10 days in the presence of the indicated compounds or without treatment (control). Compounds were refreshed every 2 days. Following expansion, T cell checkpoint receptor expression was determined by flow cytometry. Multiple LSD1 inhibitors can reduce the coexpression of PD1, Tim3, and LAG3 on CD4+ (FIG. 15A) and CD8+ (FIG. 15B) T cells relative to controls.

### Example 5

Compound 93 (“Example 93”); also referred to herein as “NVS Compound 1”

### Trans-3-(3-amino-2-methylphenyl)-1-(4-hydroxycyclohexyl)-6-methyl-1H-indole-5-carbonitrile Intermediate 93.1: 3-bromo-6-methyl-1-(1,4-dioxaspiro[4.5]decan-8-yl)-1H-indole-5-carbonitrile

[chemical structure]

[1367] The mixture of compound 74.1 (960 mg, 3.07 mmol), compound 4 (415 mg, 1.77 mmol) and Cs₂CO₃ (1.73 g, 5.31 mmol) in DMF (10 mL) was heated to 100° C. overnight. Then it was diluted with water and extracted with EA for three times. The combined organic phase was washed with brine and dried over Na₂SO₄, filtered and concentrated to give a crude product which was purified by flash column chromatography on silica gel (eluent: PE/EA, EA %=10˜20%) to give the title compound (726 mg) with 80% purity as a white solid. ¹H NMR (300 MHz, CDCl₃) δ ppm 7.84 (s, 1H), 7.29 (s, 1H), 7.26 (s, 1H), 4.35-4.20 (m, 1H), 4.00 (s, 4H), 2.66 (s, 3H), 2.06 (dd, 4H), 1.93 (d, 2H), 1.84-1.76 (m, 2H). LC-MS: [M+H]⁺=375.29, 377.24.

### Intermediate 93.2: 3-bromo-6-methyl-1-(4-oxocyclohexyl)-1H-indole-5-carbonitrile

[chemical structure]

[1368] The mixture of compound 93.1 (480 mg, 1.28 mmol) in the co-solvent of AcOH (7.5 mL) and H₂O (1.5 mL) was heated to 60° C. for 3.5 h. After cooling to rt, 10 mL of water was added. Much solid precipitated, which was filtered and washed with water to give the title compound (357 mg, 84%) as a white solid. ¹H NMR (300 MHz, CDCl₃) δ ppm 7.87 (s, 1H), 7.30 (s, 1H), 7.24 (s, 1H), 4.73 (m, 1H), 2.67 (s, 3H), 2.65-2.60 (m, 4H), 2.46-2.39 (m, 2H), 2.20 (dd, 2H). LC-MS: [M+H]⁺=331.2.

### Intermediate 93.3: 3-bromo-1-(4-hydroxycyclohexyl)-6-methyl-1H-indole-5-carbonitrile

[chemical structure]

[1369] At rt, to a mixture of compound 93.2 (340 mg, 1.03 mmol) in methanol (10 mL) was added NaBH4 (156 mg, 4.1 mmol) in several portions. The mixture gradually turned clear and was stirred at rt for 1 h. The solvent was removed under vacuum and the residue was dissolved in EA and washed with brine twice. The organic layer was dried over Na₂SO₄, filtered and concentrated to give the title compound (345 mg) as a white solid. ¹H NMR (300 MHz, CDCl₃) δ ppm 7.85 (s, 1H), 7.23 (s, 2H), 4.22 (m, 1H), 3.78 (m, 1H), 2.66 (s, 3H), 2.16 (t, 4H), 1.80 (d, 2H), 1.64 (s, 2H). LC-MS: [M+H]⁺=333.2, 335.3.

[chemical structure]

[1370] To a mixture of compound 93.3 (200 mg, 0.6 mmol) and 2-methyl-3-(4,4,5,5-tetramethyl-1,3,2-dioxaborolan-2-yl)aniline (168 mg, 0.72 mmol) in the co-solvent of i-PrOH/H₂O (6 mL, 10:1) was added 2N Na₂CO₃ aq. (1.8 mL, 3.6 mmol) and Pd(PPh₃)₂Cl₂ (42 mg, 0.06 mmol). The mixture was stirred at 100° C. for 30 min under N₂ atmosphere by microwave reactor. The reaction mixture was diluted with water and extracted with EA for three times. The combined organic phase was washed with brine and dried over Na₂SO₄, concentrated and purified by column chromatography on silica gel (PE:EA=10:1-2:1) to give a crude product which contained Ph₃P═O. It was purified by prep-HPLC (0.1% TFA/ACN/H₂O) and lyophilized to give the title compound (73.2 mg, 34%) as a pink solid. ¹H NMR (400 MHz, DMSO-d₆) δ ppm 7.76 (s, 1H), 7.69 (d, 1H), 7.64 (s, 1H), 7.21 (t, 1H), 7.07 (d, 2H), 4.47 (d, 2H), 3.84 (s, 1H), 3.58 (t, 2H), 2.59 (s, 3H), 2.13 (d, 3H), 1.94 (t, 6H), 1.53-1.44 (m, 2H). LC-MS: [M+H]⁺=360.3.

### Example 6

[1371] To test the effect of LSD1 inhibition on checkpoint protein expression on T cells, human T cells were isolated by negative selection and expanded with anti-CD3/CD28 beads at a 3:1 ratio for 7 days in the presence of the indicated compounds. Compounds were refreshed every 2 days. Following 7 days of expansion, cells were stained with antibodies against CD4, CD8, PD1, Lag3, and Tim3 and analyzed by flow cytometry. Analysis included assessment of expression of each protein individually (FIG. 16, left panel) or the simultaneous expression of PD1 and Lag3 (PD1+Lag3+) or PD1, Lag3, and Tim3 (PD1+Lag3+ Tim3+) (FIG. 16, right panel). Without being bound by theory, expression of checkpoint markers, and especially, co-expression of multiple checkpoint markers, is thought to be indicative of a more exhausted and less poly-functional T cell. The data indicate that the LSD1 inhibitors can reduce the expression of Tim3 alone, or the co-expression of PD1 and Lag3, or the co-expression of PD1, Tim3, and LAG3 on T cells relative to controls. (FIG. 16, left and right panels).

[1372] Next, checkpoint marker expression, as well as the fraction of Tscm T cells in either the CD4+ or CD8+ T cell population was assessed in response to culture of T cells in the presence or absence of LSD1 inhibitor. Briefly, T cells were isolated by negative selection and expanded with anti-CD3/CD28 beads at a 3:1 ratio for 10 days in the presence of the indicated compounds at the indicated doses or without treatment (control). Compounds were added the day after bead addition and refreshed every 2 days. Following expansion, the percentage of T_{SCM} cells was determined in CD4+ and CD8+ T cell subsets by flow cytometry using antibodies against CD4, CD8, CD45RA, CD62L, CCR7, CD27, and CD95. These data show that LSD1 inhibition (with any one of a variety of LSD1 inhibitors from multiple molecular classes) can significantly enhance the percentage of T_{SCM} cells in CD4+ (FIG. 17, left panel) and CD8+ (Figure FIG. 17, right panel) T cells relative to controls. As well, following expansion, T cell checkpoint receptor expression was determined in CD4+ and CD8+ T cell subsets by flow cytometry using antibodies against CD4, CD8, Tim3, Lag3, and PD1. These data show that LSD1 inhibition (with any one of a variety of LSD1 inhibitors from multiple molecular classes) can significantly reduce the co-expression of PD1, Tim3, and Lag3 on CD4+ T cells (FIG. 18, left panel) and on CD8+ (FIG. 18, right panel) T cells relative to controls.

[1373] The foregoing written specification is considered to be sufficient to enable one skilled in the art to practice the invention. The present invention is not to be limited in scope by the constructs deposited, since the deposited embodiments are intended to illustrate only certain aspects of the invention and any constructs that are functionally equivalent are within the scope of this invention. The deposit of material herein does not constitute an admission that the written description herein contained is inadequate to enable the practice of any aspect of the invention, including the best mode thereof, nor is it to be construed as limiting the scope of the claims. Indeed, various modifications of the invention in addition to those shown and described herein will become apparent to those skilled in the art from the foregoing description and fall within the scope of the appended claims.

[1374] It is understood that the application of the teachings of the present invention to a specific problem or situation will be within the capabilities of one having ordinary skill in the art in light of the teachings contained herein.

[1375] The disclosures of each and every citation in the specification are expressly incorporated herein by reference.

### Example 7—Investigations of LSD1 Inhibitors

### Generation of BCMA-CAR Lentiviral Constructs

[1376] The scFvs used in the BCMA constructs that were assessed in the Examples were independently synthesized based on an anti-BCMA scFV sequence of BCMA-10 (139109) (as described in WO2016/014565)). The scFV was cloned in a light-to-heavy chain direction, with a flexible linker connecting the VL and VH domains, into a vector backbone containing the CD8 hinge region along with the 4-1BB molecule and the CD3zeta molecule.

### Cell Lines and Cell Transduction

[1377] Human T cells were transduced by spinoculation with lentiviral supernatant from 293T cells transfected with BCAM-CAR plasmid DNA.

### Cancer Cells

[1378] KMS 11, NHICI929 and NALM6 cell lines were obtained from the ATCC and maintained in media according to supplier's recommendations. To produce a bioluminescent model for T cell killing, cytokine assays and in vivo efficacy study, all cells were transduced with a luciferase lentiviral construct and kept under antibiotic selection.

### Flow Cytometry

[1379] Cells were isolated from in vitro culture, washed once in MACS+0.5% BSA buffer, and stained on ice using either biotinylated Protein L followed by incubated with a fluorochrome-conjugated streptavidin reagent or an antibody recognizing the given target antigen. In all analyses, the population of interest was gated based on forward vs side scatter characteristics, followed by singlet gating, and live cells were gated. Flow cytometry was performed on a five laser Fortessa (Becton-Dickinson). Data were analysed using R script (Novartis Internal program) and flowjo software. The antibodies used are listed below in Table 5 (for CD19 CAR detection, anti-idiotype CD19 Antibody was included, for BCMA-CAR detection, protein L was included followed by streptavidin-PE staining).

TABLE 5
Antibodies used for staining

| | | | | | For 10 | | | | |
|---|---|---|---|---|---|---|---|---|---|
| | | | | | plates | | | | |
| | | | | | (ul) | | | | |
| Vendor/Cat# | Differentiation Panel (Panel 2) | | uL/sample | uL/100 samples | FMO1B | FMO2B | FMO3B | FMO4B | FMO5B |
| Biolegend/423102 | BV510 | Viability | | | −CD27 | −CD28 | −CD45RA | −CD62L | −CCR7 |
| Biolegend/344822 | AF700 | CD3 | 0.5 | 50 | 5 | 5 | 5 | 5 | 5 |
| Biologend/344624 | PerCP | CD4 | 1 | 100 | 10 | 10 | 10 | 10 | 10 |
| BD/560179 | APCH7 | CD8 | 0.5 | 50 | 5 | 5 | 5 | 5 | 5 |
| Biologend/302824 | BV421 | CD27 | 0.7 | 70 | | 7 | 7 | 7 | 7 |
| BD/562296 | PE-CF594 | CD28 | 0.7 | 70 | 7 | | 7 | 7 | 7 |
| Biologend/304210 | APC | CD45RA | 0.7 | 70 | 7 | 7 | | 7 | 7 |
| Biologend/304822 | PE-Cy7 | CD62L | 0.7 | 70 | 7 | 7 | 7 | | 7 |
| Biologend/353216 | FITC | CCR7 | 1 | 100 | 10 | 10 | 10 | 10 | |
| Jackson Immunoresearch/ | PE | Streptavidin | 0.2 | 20 | 2 | 2 | 2 | 2 | 2 |
| 016-110-084 | | | | | | | | | |
| | | Sum | 6 | 600 | 53 | 53 | 53 | 53 | 53 |
| | | FACS Buffer | 34 | 3400 | 347 | 347 | 347 | 347 | 347 |
| | | Final | 40 | 4000 | 400 | 400 | 400 | 400 | 400 |
| | | Volume/well | | | | | | | |

[1380] Data were analyzed using R script (novartis internal program) and verified by flowjo software. The following parameters were investigated:
[1381] 1. Ratio of CD8/CD4 were calculated;
[1382] 2. % Tscm, Tem, Tem of CD3+ T cells;
[1383] 3. Ratios of Tscm/Tem and Tscm/Tcm of CD3+ T cells were calculated;
[1384] 4. % Tscm, Tem, Tem of CD8+ or CD4+ T cells were calculated;
[1385] 5. Ratios of Tscm/Tem and Tscm/Tcm of CD8+ or CD4+ T cells were calculated; and/or
[1386] 6. In the case of CAR+-T cells, percentage of Tscm, Tem, Tem of CD19-CAR+ T, and BCMA-10-CAR+ T cells were evaluated.

[1387] The Tscm population were evaluated as double CD45RA+CCR7+ or triple CD45RA+CCR7+CD62L+ in a given total live CD3+ or subset CD4+ or CD8+ T cell population. Tem were presented as double CD45RA−CCR7− and Tem as CD45RA−CCR7+ in a given total live CD3+ or subset CD4+ or CD8+ T cell population (FIG. 19 and FIG. 25 illustrate the gating strategies).

### Compound Treatments

[1388] In all instances, LSD inhibitor compounds were either resuspended in water (H₂O) and/or DMSO, depending on compound solubility. In all instances compounds were added throughout the ex vivo T cell culture, and T cells were washed extensively prior to assay. Compounds and concentrations used were 1 μM, 10 μM, 100 μM, 1 nM, 10 nM, 100 nM LSD1i-GSK (GSK-LSD1 inhibitor, CAS Number 1431368-48-7, Sigma); 1 μM, 10 μM, 100 μM, 1 nM, 1.1 nM, 3.3 nM, 10 nM, 100 nM NVS Compound 93 (LSD1 inhibitor; Novartis), or 100 nM Compound B (LSD1 inhibitor; Novartis), or 100 nM Compound A were used. In the figures, “control” refers to vehicle with no LSD inhibitor compound added. For Pan CD3+ T cell expansion experiment, compound treatment was started at 4 h or 24 h after activation; for CART cell production, compound treatment was started at 48 h after viral transduction, and all treatments continued through culture period in all conditions.

### Cytokine Secretion

[1389] T cell killing was directed towards CAR19-expressing NALM6 cell lines or BCMA-expressing KMS 11 or NHICI929 cell lines stably expressing luciferase. Untransduced cells (UTD) and a non-targeting isotype control scFV CART (IsoCAR) were used to determine non-specific background cytokine levels. Effector and target cells were incubated at a 1.25: 1 ratio in RPMI containing 10% FBS for 18 hours. Supernatant was analysed by 3-plex array according the manufacturer's instructions (Invitrogen).

### Proliferation Assay

[1390] CAR19 T or BCMA_CAR T cells were tested for their ability to proliferate in response to exposure to antigen on target cells. Target cells included NALM6, KMS 11 and NHICI929 cells. Untransduced T cells (UTD) and a non-targeting isotype control scFV CART (IsoCAR) were used as non-specific controls for background T cell effects. On the day of assay (Day 0), target cells were counted and transferred to a 50 ml tube in 6 mL of T cell media at 3e6 cells/ml. Target cells were irradiated on ice at 10,000 rad. After irradiation, target cells were washed twice in T cell media, counted, and resuspended to 5e5 cells/ml in T cell media on ice.

[1391] Frozen transduced T cells were thawed, washed in 10 mL complete T cell media, spun at 300 g for 10 min, and resuspended gently in 3 mL of complete T cell media at RT. T-cells were then counted in a cellometer and resuspended to 2.5e6/mL in 10 mL of media. In a 96 well U-bottom plate, 25,000 irradiated target cells and 25,000 transduced CAR T cells (1:1 ratio) were combined in duplicate wells. In a separate well, 75,000 Anti-CD3/CD28 beads were added in 100 d of medium to 25,000 transduced T cells to create a 1:3 cells-to-beads ratio as positive control; in another well, 100 d of medium was added to 25,000 transduced T cells alone as media-only control. In some cases, 30,000 cells were tested for both target and CART cells. Cells were incubated for 4 days at 37° C., 5% CO2.

[1392] On day 4, cells were harvested and duplicates were combined by pipetting and transferring into the same well on the U-bottom plate for staining for FACS of CD3 and CAR using protein L. After staining, cells were resuspended in 120d MACS+0.5% BSA buffer and 20 μl/well countbright beads were added to each well. Proliferation was measured as the number of FACS positive cells detected in the period of time used to count 2500 beads.

### In Vivo Efficacy Study of the LSD1i-Conditioned BCMA-CART Cells

[1393] BCMA-CART cells expanded ex vivo either in the presence or absence of LSD1 inhibitor were tested for their ability to eliminate tumor in vivo using the immune compromised NSG mouse bearing established luciferized KMS11 tumors (1e6 cells/mouse); tumor burden are measured by bioluminescent intensity signal generated from the enzyme-substrate (luciferase-luciferin) reaction by injecting the luciferin to the mice.

### Results

### LSD1 Inhibitors Expand Tscm, Reduce Tem at a Dose Responsive Fashion.

[1394] To test the dose responses of LSD1 inhibitors on the T cell phenotypes, human Pan CD3+ T cells from two healthy subjects were isolated by negative selection and expanded with anti-CD3/CD28 beads at a 3:1 ratio for 10 days in the presence of Compound 93 or LSD1i-GSK at different concentrations from 100 nM, and subsequent serial 10× dilution to 1 μM starting at 4 hours after activation. Meanwhile, other three LSD1 inhibitors Compound A and Compound B at 100 nM were also tested for their capability to sustain Tscm cells in some cells starting at 24 h after activation. Compounds were refreshed every 2-3 days when fresh media is replenished. Following 10 days of expansion, T cells were harvested and de-beaded and their phenotypes were analyzed by flow cytometry using antibodies against CD3, CD4, CD8, CD45RA, CCR7, CD62L, CD27 and CD28 plus live/dead dye to exclude the dead cell population. Data show that:
[1395] 1. Both compound 93 and LSD1i-GSK can significantly increase the ratio of CD8/CD4 in response to LSD1 dose escalation, meaning CD8 expand more than CD4 with increased dosage of LSD1 inhibitors during ten day expansion without changing the total expansion rate of total cells. (FIG. 20A).
[1396] 2. Both compound 93 and LSD1i-GSK could increase/sustain CD3+ Tscm, decrease Tem, in a dose responsive fashion, observed between 1 nM to 100 nM; 10 nM and 100 nM showed similar level of induction, while Tcm remain the same. The EC50 of compound 93 and LSD1i-GSK for inducing Tscm CD3+ T cells are 2.59 nM and 1.085 nM, respectively (FIG. 23A and FIG. 23B);
[1397] 3. Correspondingly, the ratio of Tscm/Tem of CD3+ T cells increases in response to dose elevation, but that of Tscm/Tcm remains unchanged at all doses. (FIG. 20B).
[1398] 4. Both compound 93 and LSD1i-GSK could increase/sustain CD8+ Tscm and CD4+ Tscm, decrease Tem, in a dose responsive fashion, observed between 1 nM to 100 nM; 10 nM and 100 nM showed similar level of induction, while Tcm remains unchanged. The majority of Tscm population are from CD8 T cells, while CD4+ Tscm is about 5% at 100 nM (which is also increased compared to controls and showing positive dose response) observed from these results (FIGS. 21 and 22). The EC50 of compound 93 and LSD1i-GSK for inducing Tscm CD8+ T cells are 3.25 nM and 1.08 nM, respectively (FIG. 23D and FIG. 23C);
[1399] 5. Correspondingly, the ratio of Tscm/Tem of CD8+ T cells significantly increases in response to dose elevation but it was hardly seen in the CD4+ population; moreover, the ratio of Tscm/Tcm remains largely unchanged relatively to control. (FIG. 21 and FIG. 22).
[1400] 6. Compound A and Compound B at 100 nM are also able to sustain Tscm and reduce Tem of the total CD3+ and subset of CD8+ T cells, and to much less extent, of the CD4+ T cells, comparable to Compound 93 as shown in FIG. 24.

### LSD1 Inhibition Expands Tscm, Reduce Tem in the CART Product in a Dose Dependent Manner.

[1401] To test the dose responses of LSD1 inhibitors on the CART cell phenotypes, human pan CD3+ T cells from one healthy subject were isolated by negative selection and expanded with anti-CD3/CD28 beads at a 3:1 ratio for 10 days in the presence of Compound 93 at concentrations of 100 nM, 10 nM, 3.3 nM and 1.1 nM starting at 48 hours after viral transduction. Different concentrations of the Compound 93 were refreshed every 2-3 days when fresh media is replenished. Following 10 days of expansion, CART product were harvested and de-beaded and their phenotypes were analyzed by flow cytometry using antibodies against CD3, CD4, CD8, CD45RA, CCR7, CD62L, CD27, CD28, anti-CD19 idiotype or protein L following SA-PE staining plus live/dead dye to exclude the dead cell population. Data show in below bullet points:
[1402] LSD1 inhibition by compound 93 at different tested doses not change the total T cell percentage in all final CART products (UTD, CD19CART and BCMA-CART) (FIG. 26A);
[1403] Compound 93 at different tested doses does not remarkably affect CD19-CAR or BCMA-CAR expression (FIG. 26B).
[1404] Compound 93 at different tested doses does not affect CD8+ CAR and CD4+ CAR T cell proportions. (FIG. 26C);
[1405] LSD1 inhibition by Compound 93 augments CD8+ Tscm, reduces CD8+ Tem and increases the ratio of Tscm/Tem in the final CD19-CART and BCMA-CART cell populations (which include CAR- and CAR+ population), in a dose dependent manner, but does not change the Tem (either double CD45RA+CCR7+ or triple CD45RA+CCR7+CD62L+) percentage at all tested doses (FIG. 27);
[1406] LSD1 inhibition by Compound 93 sustains CD19CAR+CD8 Tscm, reduces CAR+ Tem but only increases BCMA-CAR+ CD8+ Tscm in a dose dependent fashion, the CAR+ CD8+ Tem percentage maintains a similar level at all tested doses (FIG. 28).
   LSD1 Inhibition by Compound 93 Enhances Cytokine Production from CD19-CAR and BCMA-CART

[1407] CD19-CART and BCMA-CART cells were incubated with NALM6 (CD19+ but BCMA−), KMS11 and NHICI929 (both CD19− BCMA+) cell lines for 20 hrs at ratio 1.25 to 1. Supernatants were harvested and analyzed by cytokine bead array. LSD1 inhibition by compound 93 at 100 nM significantly enhances cytokine production from CD19 CART and BCMA-CART cells in response to their specific targets. (FIG. 29).

### LSD1 Inhibition by Compound 93 Enhances Proliferation of CD19-CART and BCMA-CART Cells

[1408] Irradiated tumor lines were mixed with T cells at a 1:1 ratio following 4 day incubation, T cells were stained for CAR using Protein L and CAR+ T cell numbers were determined by FACS using countbright beads. Proliferation was measured as the number of FACS positive cells detected in the period of time used to count 2500 beads. LSD1 inhibition by compound 93 at 100 nM enhances the proliferative capacity of CD19-CART and BCMA-CART cells against CD19+ or BCMA+ target cells, respectively, shown in FIG. 30-32 measured as total CAR+ CD3, CD8 or CD4 T cells.

### Inhibition of LSD1 Enhances BCMA-CART Cells Efficacy in Vivo

[1409] Untransduced T cells and BCMA-CART cells with or without ex vivo LSD1i treatment were injected once into mice bearing established luciferized KMS11 tumors. A Total 6.25 million T cells including 0.167 millions of total CAR⁺ cells were injected. Interestingly, we found that inhibition of LSD1 increases the anti-tumor activity of CAR negative T cells. Without being bound by theory, this activity may be the result of the increased fraction of Tscm cells as a result of LSD1 inhibition, which results in a population of cells with increased cytokine production and proliferative potential. As well, inhibition of LSD1 enhances the efficacy BCMA-CART cells in vivo. These data demonstrate that compound 93-treated untransduced T cells alone show anti-tumor activity in a slow regression mode over time. As well, this compound can also significantly enhance the antigen-specific anti-tumor function of BCMA CART cells in the acute phase comparing the regular BCMA-CART, while both CART cells (one with, one without compound 93) have durable effects on eliminating tumor growth (FIG. 33).

[1410] This application is being filed with a sequence listing. To the extent there are any discrepancies between the sequence listing and any sequence recited in the specification, the sequence recited in the specification should be considered the correct sequence.

### INCORPORATION BY REFERENCE

[1411] All publications, patents, and patent applications mentioned herein are hereby incorporated by reference in their entirety as if each individual publication, patent or patent application was specifically and individually indicated to be incorporated by reference. In case of conflict, the present application, including any definitions herein, will control.

### EQUIVALENTS

[1412] Those skilled in the art will recognize, or be able to ascertain using no more than routine experimentation, many equivalents to the specific embodiments of the invention described herein. While this invention has been disclosed with reference to specific aspects, it is apparent that other aspects and variations of this invention may be devised by others skilled in the art without departing from the true spirit and scope of the invention. The appended claims are intended to be construed to include all such aspects and equivalent variations.

1. A method of treating a subject, comprising administering to said subject an LSD1 inhibitor and a population of immune effector cells engineered to express a CAR.

2. The method of claim 1, wherein:
a) the LSD1 inhibitor is administered before the subject is administered said population of immune effector cells;
b) the LSD1 inhibitor is administered concurrently with said population of immune effector cells;
c) the LSD1 inhibitor is administered after the subject is administered said population of immune effector cells; or
d) any combination of a), b) and/or c).

3. The method of claim 2, wherein;
(a) the LSD1 inhibitor is administered before the subject is administered said population of immune effector cells, and wherein said administration of the LSD1 inhibitor is continued for a period of time after the administration of said population of immune effector cells; and/or
(b) the administration of the LSD1 inhibitor is in an amount sufficient to increase an anti-tumor effect of said population of immune effector relative to an equivalent population of said immune effector cells administered in the absence of said LSD1 inhibitor.

4. (canceled)

5. A method of increasing the therapeutic efficacy of a population of immune effector cells engineered to express a CAR, comprising a step of decreasing the activity or expression of LSD1 in said cells, transiently or permanently.

6. (canceled)

7. The method of claim 1, wherein the administration of the LSD1 inhibitor results in:
(a) an increase in the proportion of naive T cells, e.g., T_{SCM} cells;
(b) an increase in the number of naive T cells, e.g., T_{SCM} cells;
(c) a decrease in the number of T_{EM} cells;
(d) a decrease in the proportion of T_{EM} cells;
(e) an increase in the proportion of CD45RA+CD62L+ T cells;
(f) an increase in the number of CD45RA+CD62L+ T cells;
(g) an increase in the proportion of CD45RA+CCR7+ T cells;
(h) an increase in the number of CD45RA+CCR7+ T cells;
(i) a decrease in the proportion of PD-1 positive immune effector cells;
(j) an increase in the ratio of PD-1 negative immune effector cells/PD-1 positive immune effector cells;
(k) a decrease in the proportion of PD-1+/Lag3+/Tim3+ immune effector cells;
(l) an increase in the ratio of PD-1−/Lag3−/Tim3− immune effector cells to PD-1+/Lag3+/Tim3+ immune effector cells;
(m) an increase in the proliferation of the immune effector cells;
(n) an increase in the production of cytokines (e.g., IFNg and/or IL-2) from said population of immune effector cells; or
(o) combination of two or more of the above;
optionally as compared to a subject not administered the LSD1 inhibitor.

8.-14. (canceled)

15. A population of immune effector cells, made by the method of claim 5.

16. A population of immune effector cells engineered to express a chimeric antigen receptor (CAR), wherein the CAR comprises an antigen-binding domain, a transmembrane domain, and an intracellular signaling domain, and wherein expression and/or function of LSD1 in said cell has been reduced or eliminated.

17. The population of immune effector cells of claim 16, wherein the population of immune effector cells:
(a) further comprises an LSD1 inhibitor, or
(b) has been contacted with an LSD1 inhibitor.

18. (canceled)

19. The method of claim 1, wherein the population of immune effector cells comprise:
(a) T cells or NK cells;
(b) CD8+ T cells, CD4+ T cells, or a combination thereof; and/or
(c) human cells.

20.-22. (canceled)

23. The method of claim 1, wherein the CAR comprises an antigen binding domain, a transmembrane domain, and an intracellular signaling domain, comprising an intracellular signaling domain comprising a costimulatory domain and/or a primary signaling domain, and wherein the antigen binding domain binds to a tumor antigen selected from a group consisting of: TSHR, CD19, CD123, CD22, CD30, CD171, CS-1, CLL-1, CD33, EGFRvIII, GD2, GD3, BCMA, Tn Ag, PSMA, ROR1, FLT3, FAP, TAG72, CD38, CD44v6, CEA, EPCAM, B7H3, KIT, IL-13Ra2, Mesothelin, IL-11Ra, PSCA, PRSS21, VEGFR2, LewisY, CD24, PDGFR-beta, SSEA-4, CD20, Folate receptor alpha, ERBB2 (Her2/neu), MUC1, EGFR, NCAM, Prostase, PAP, ELF2M, Ephrin B2, IGF-I receptor, CAIX, LMP2, gp100, bcr-abl, tyrosinase, EphA2, Fucosyl GM1, sLe, GM3, TGS5, HMWMAA, o-acetyl-GD2, Folate receptor beta, TEM1/CD248, TEM7R, CLDN6, GPRC5D, CXORF61, CD97, CD179a, ALK, Polysialic acid, PLAC1, GloboH, NY-BR-1, UPK2, HAVCR1, ADRB3, PANX3, GPR20, LY6K, OR51E2, TARP, WT1, NY-ESO-1, LAGE-la, MAGE-A1, legumain, HPV E6, E7, MAGE A1, ETV6-AML, sperm protein 17, XAGE1, Tie 2, MAD-CT-1, MAD-CT-2, Fos-related antigen 1, p53, p53 mutant, prostein, survivin and telomerase, PCTA-1/Galectin 8, MelanA/MART1, Ras mutant, hTERT, sarcoma translocation breakpoints, ML-IAP, ERG (TMPRSS2 ETS fusion gene), NA17, PAX3, Androgen receptor, Cyclin B1, MYCN, RhoC, TRP-2, CYP1B1, BORIS, SART3, PAX5, OY-TES1, LCK, AKAP-4, SSX2, RAGE-1, human telomerase reverse transcriptase, RU1, RU2, intestinal carboxyl esterase, mut hsp70-2, CD79a, CD79b, CD72, LAIR1, FCAR, LILRA2, CD300LF, CLEC12A, BST2, EMR2, LY75, GPC3, FCRL5, and IGLL1.

24. (canceled)

25. (canceled)

26. The method of claim 23, wherein:
(a) the antigen-binding domain is an antibody or antibody fragment comprising:
(i) the amino acid sequence of a CD19 binding domain according to Tables 6-9;
(ii) the amino acid sequence of CTL019 scFv domain according to Table 9 or an amino acid sequence according to SEQ ID NO: 957, or an amino acid sequence at least 95% identical thereto;
(iii) the amino acid sequence of a humanized CD19 binding domain according to Tables 6-9;
(iv) the amino acid sequence of CAR2 scFv domain according to Table 9 or an amino acid sequence according to SEQ ID NO: 898, or an amino acid sequence at least 95% identical thereto;
(v) the amino acid sequence of a BCMA binding domain according to Tables 11A-11B; or
(vi) the amino acid sequence of 139109 scFv domain according to Table 11A or an amino acid sequence according to SEQ ID NO: 967, or an amino acid sequence at least 95% identical thereto;
(b) wherein the CAR comprises:
(i) the amino acid sequence of a CD19 CAR according to Tables 6-9;
(ii) the amino acid sequence of CTL019 according to Table 9 or an amino acid sequence according to SEQ ID NO: 956 or an amino acid sequence at least 95% identical thereto;
(iii) the amino acid sequence of a humanized CD19 CAR according to Tables 6-9;
(iii) the amino acid sequence of CAR2 according to Table 9 or an amino acid sequence according to SEQ ID NO: 902, or an amino acid sequence at least 95% identical thereto;
(iv) the amino acid sequence of a BCMA CAR according to Tables 11A-11B, or
(v) the amino acid sequence of 139109 CAR according to Table 11A or an amino acid sequence according to SEQ ID NO: 971, or an amino acid sequence at least 95% identical thereto;
(c) the transmembrane domain comprises:
(i) an amino acid sequence having at least one, two or three modifications but not more than 20, 10 or 5 modifications of an amino acid sequence of SEQ ID NO: 12, or a sequence with 95-99% identity to an amino acid sequence of SEQ ID NO: 12; or
(ii) the sequence of SEQ ID NO: 12;
(d) antigen binding domain is connected to the transmembrane domain by a hinge region, wherein said hinge region comprises SEQ ID NO: 2 or SEQ ID NO: 6, or a sequence with 95-99% identity thereof;
(e) the intracellular signaling domain comprises a primary signaling domain and/or a costimulatory signaling domain, wherein the primary signaling domain comprises a functional signaling domain of a protein chosen from CD3 zeta, CD3 gamma, CD3 delta, CD3 epsilon, common FcR gamma (FCER1G), FcR beta (Fc Epsilon Rib), CD79a, CD79b, Fcgamma RIIa, DAP10, or DAP12;
(f) the primary signaling domain comprises:
(i) an amino acid sequence having at least one, two or three modifications but not more than 20, 10 or 5 modifications of an amino acid sequence of SEQ ID NO: 18 or SEQ ID NO: 20, or a sequence with 95-99% identity to an amino acid sequence of SEQ ID NO: 18 or SEQ ID NO: 20; or
(ii) the amino acid sequence of SEQ ID NO:18 or SEQ ID NO: 20;
(g) the intracellular signaling domain comprises a costimulatory signaling domain, or a primary signaling domain and a costimulatory signaling domain, wherein the costimulatory signaling domain comprises a functional signaling domain of a protein selected from the group consisting of CD27, CD28, 4-1BB (CD137), OX40, CD30, CD40, PD-1, ICOS, lymphocyte function-associated antigen-1 (LFA-1), CD2, CD7, LIGHT, NKG2C, B7-H3, a ligand that specifically binds with CD83, ICAM-1, GITR, BAFFR, HVEM (LIGHTR), SLAMF7, NKp80 (KLRF1), CD160, CD19, CD4, CD8alpha, CD8beta, IL2R beta, IL2R gamma, IL7R alpha, ITGA4, VLA1, CD49a, ITGA4, IA4, CD49D, ITGA6, VLA-6, CD49f, ITGAD, CD11d, ITGAE, CD103, ITGAL, CD11a, LFA-1, ITGAM, CD11b, ITGAX, CD11c, ITGB1, CD29, ITGB2, CD18, LFA-1, ITGB7, TNFR2, TRANCE/RANKL, DNAM1 (CD226), SLAMF4 (CD244, 2B4), CD84, CD96 (Tactile), CEACAMI, CRTAM, Ly9 (CD229), CD160 (BY55), PSGL1, CD100 (SEMA4D), CD69, SLAMF6 (NTB-A, Ly108), SLAM (SLAMFI, CD150, IPO-3), BLAME (SLAMF8), SELPLG (CD162), LTBR, LAT, GADS, SLP-76, PAG/Cbp, NKp44, NKp30, NKp46, and NKG2D;
(h) the costimulatory signaling domain comprises an amino acid sequence having at least one, two or three modifications but not more than 20, 10 or 5 modifications of an amino acid sequence of SEQ ID NO:14 or SEQ ID NO: 16, or a sequence with 95-99% identity to an amino acid sequence of SEQ ID NO:14 or SEQ ID NO: 16;
(i) the intracellular domain comprises the sequence of SEQ ID NO: 14 or SEQ ID NO: 16, and the sequence of SEQ ID NO: 18 or SEQ ID NO: 20, wherein the sequences comprising the intracellular signaling domain are expressed in the same frame and as a single polypeptide chain; and/or
(j) the CAR comprises a leader sequence comprising SEQ ID NO: 2.

27.-35. (canceled)

36. The method of claim 1, wherein the LSD1 inhibitor is: (1) a gene editing system targeted to one or more sites of the LSD1 gene, or its corresponding regulatory elements; (2) a nucleic acid comprising sequence complementary to a target sequence of the LSD1 gene; (3) a protein; (4) a small molecule; (5) a nucleic acid encoding any of (1)-(3); or (6) any combination of (1) -(5).

37. The method of claim 36, wherein:
(a) the LSD1 inhibitor is an shRNA or siRNA comprising sequence complementary to a target sequence of the LSD1 gene listed in Table 1, e.g., selected from SEQ ID NO: [43] to SEQ ID NO: [82];
(b) the LSD1 inhibitor is an shRNA encoded by a nucleic acid comprising a sequence encoding an anti-LSD1 shRNA selected from SEQ ID NO: [83] to SEQ ID NO: [122];
(c) the LSD1 inhibitor is nucleic acid comprising a sequence encoding an anti-LSD1 shRNA of Table 1 selected from SEQ ID NO: [83] to SEQ ID NO: [122];
(d) the LSD1 inhibitor is a nucleic acid disposed on a vector;
(e) the LSD1 inhibitor is a genome editing system specific for a sequence of the LSD1 gene (KDM1A) or its regulatory elements selected from a CRISPR genome editing system, a zinc finger nuclease genome editing system, a TALEN genome editing system and a meganuclease genome editing system;
(f) the LSD1 inhibitor is a small molecule;
(g) the LSD1 inhibitor is a protein that is a dominant negative binding partner of LSD1, or nucleic acid encoding said dominant negative binding partner of LSD1; or
(h) the inhibitor of LSD1 is a protein that is a dominant negative LSD1, or nucleic acid encoding said dominant negative LSD1.

38.-40. (canceled)

41. The method of claim 37, wherein:
(a) the vector further comprises a U6 or H1 promoter operably linked to said nucleic acid;
(b) the vector is a retroviral vector, a lentiviral vector, an adenoviral vector, an adeno-associated viral (AAV) vector, a herpes simplex virus (HSV) vector, a plasmid, a minicircle, a nanoplasmid, or an RNA vector;
(c) the vector further comprises sequence encoding a CAR;
(d) the LSD1 inhibitor is a CRISPR genome editing system comprising a gRNA molecule comprising a targeting domain complementary to a sequence of the LSD1 gene (KDM1A) or its regulatory elements, e.g., comprising any one of SEQ ID NO: [132] to [862];
(e) the small molecule is a reversible or irreversible LSD1 inhibitor;
(f) the small molecule inhibitor is conjugated to an antibody or antigen-binding fragment thereof, e.g., wherein the antibody or antigen-binding fragment thereof recognizes an antigen on the surface of a T cell;
(g) the dominant negative binding partner of LSD1 is a histone deacetylase (HDAC) that interacts with LSD1 or other member of the Co-REST or AR co-activator complex; or
(h) the dominant negative LSD1 is catalytically inactive LSD1.

42.-47. (canceled)

48. The method of claim 37, wherein the LSD1 inhibitor is:
a) GSK2699537;
b) rel-2-[[(1R,2S)-2-[4-[(4-chlorophenyl)methoxy]phenyl]cyclopropyl]amino]-1-(4-methyl-1-piperazinyl)-ethanone;
c) (R)-4-(5-(pyrrolidin-3-ylmethoxy)-2-(p-tolyl)pyridin-3-yl)benzonitrile;
d) (1S,2R)-N-((2-methoxypyridin-3-yl)methyl)-2-phenylcyclopropan-1-amine;
e) N,N-dimethyl-1-((4-(4-(4-(piperidin-4-yl)phenyl)-1H-indazol-1-yl)phenyl)sulfonyl)piperidin-4-amine;
f) 5-(6-chloro-4′-(methylsulfonyl)-[1,1′-biphenyl]-3-yl)-2-(piperazin-1-yl)-1H-pyrrole-3-carbonitrile;
g) rel-N-[(1R,2S)-2-Phenylcyclopropyl]-4-Piperidinamine;
h) 2-(1R,2S)-2-(4-(Benzyloxy)phenyl)cyclopropylamino)-1-(4-methylpiperazin-1-yl)ethanone;
i) Trans-3-(3-amino-2-methylphenyl)-1-(4-hydroxycyclohexyl)-6-methyl-1H-indole-5-carbonitrile; or
j) a pharmaceutically acceptable salt of any of the foregoing.

49.-53. (canceled)

54. A method of treating a subject in need thereof, comprising administering to said subject an effective amount of the population of immune effector cells of claim 15.

55. The method of claim 54, wherein:
(a) the method further comprises administering to said subject an LSD1 inhibitor;
(b) the subject receives a pre-treatment of the LSD1 inhibitor, prior to the administration of the population of immune effector cells;
(c) the subject receives concurrent treatment with an LSD1 inhibitor and the population of immune effector cells;
(d) receives treatment with an LSD1 inhibitor after administration of the population of immune effector cells;
(e) the subject has a disease associated with expression of a tumor antigen selected from a proliferative disease, a precancerous condition, a cancer, and a non-cancer related indication associated with expression of the tumor antigen; and/or
(f) the subject is a human.

56.-59. (canceled)

60. The method of claim 55, wherein the cancer is:
(a) a hematologic cancer chosen from one or more of chronic lymphocytic leukemia (CLL), acute leukemias, acute lymphoblastic leukemia (ALL), acute myeloid leukemia (AML), B-cell acute lymphoblastic leukemia (B-ALL), T-cell acute lymphoblastic leukemia (T-ALL), chronic myelogenous leukemia (CML), B cell prolymphocytic leukemia, blastic plasmacytoid dendritic cell neoplasm, Burkitt's lymphoma, diffuse large B cell lymphoma, follicular lymphoma, hairy cell leukemia, small cell- or a large cell-follicular lymphoma, malignant lymphoproliferative conditions, MALT lymphoma, mantle cell lymphoma, marginal zone lymphoma, multiple myeloma, myelodysplasia and myelodysplastic syndrome, non-Hodgkin's lymphoma, Hodgkin's lymphoma, plasmablastic lymphoma, plasmacytoid dendritic cell neoplasm, Waldenstrom macroglobulinemia, or pre-leukemia; or
(b) selected from the group consisting of colon cancer, rectal cancer, renal-cell carcinoma, liver cancer, non-small cell carcinoma of the lung, cancer of the small intestine, cancer of the esophagus, melanoma, bone cancer, pancreatic cancer, skin cancer, cancer of the head or neck, cutaneous or intraocular malignant melanoma, uterine cancer, ovarian cancer, rectal cancer, cancer of the anal region, stomach cancer, testicular cancer, uterine cancer, carcinoma of the fallopian tubes, carcinoma of the endometrium, carcinoma of the cervix, carcinoma of the vagina, carcinoma of the vulva, Hodgkin's Disease, non-Hodgkin's lymphoma, cancer of the endocrine system, cancer of the thyroid gland, cancer of the parathyroid gland, cancer of the adrenal gland, sarcoma of soft tissue, cancer of the urethra, cancer of the penis, solid tumors of childhood, cancer of the bladder, cancer of the kidney or ureter, carcinoma of the renal pelvis, neoplasm of the central nervous system (CNS), primary CNS lymphoma, tumor angiogenesis, spinal axis tumor, brain stem glioma, pituitary adenoma, Kaposi's sarcoma, epidermoid cancer, squamous cell cancer, T-cell lymphoma, environmentally induced cancers, combinations of said cancers, and metastatic lesions of said cancers.

61.-63. (canceled)

64. A compound selected from (i) N,N-dimethyl-1-((4-(4-(4-(piperidin-4-yl)phenyl)-1H-indazol-1-yl)phenyl)sulfonyl)piperidin-4-amine; ii) 5-(6-chloro-4′-(methylsulfonyl)biphenyl-3-yl)-2-(piperazin-1-yl)-1H-pyrrole-3-carbonitrile; iii) a pharmaceutically acceptable salt thereof.

65.-75. (canceled)

76. The method of claim 5, wherein decreasing the activity or expression of LSD1 in said cells comprises contacting the cells with an LSD1 inhibitor and wherein the contacting of the LSD1 inhibitor results in:
(a) an increase in the proportion of naive T cells, e.g., T_{SCM} cells;
(b) an increase in the number of naive T cells, e.g., T_{SCM} cells;
(c) a decrease in the number of T_{EM} cells;
(d) a decrease in the proportion of T_{EM} cells;
(e) an increase in the proportion of CD45RA+CD62L+ T cells;
(f) an increase in the number of CD45RA+CD62L+ T cells;
(g) an increase in the proportion of CD45RA+CCR7+ T cells;
(h) an increase in the number of CD45RA+CCR7+ T cells;
(i) a decrease in the proportion of PD-1 positive immune effector cells;
(j) an increase in the ratio of PD-1 negative immune effector cells/PD-1 positive immune effector cells;
(k) a decrease in the proportion of PD-1+/Lag3+/Tim3+ immune effector cells;
(l) an increase in the ratio of PD-1−/Lag3−/Tim3− immune effector cells to PD-1+/Lag3+/Tim3+ immune effector cells;
(m) an increase in the proliferation of the immune effector cells;
(n) an increase in the production of cytokines (e.g., IFNg and/or IL-2) from said population of immune effector cells; or
(o) a combination of two or more of the above;
optionally as compared to cells not contacted with the LSD1 inhibitor.

The application's sequence listing, which the Patent Office published only in electronic form, follows.

SEQUENCE LISTING (1941 sequences)

SEQ ID NO: 1 - DNA, 1184 bp, synthetic construct
  misc_feature 1..1184: note = Description of Artificial Sequence: Synthetic polynucleotide
  source 1..1184: mol_type = other DNA
cgtgaggctccggtgcccgtcagtgggcagagcgcacatcgcccacagtccccgagaagttggggggaggggtcggcaattgaaccggtgcctagagaaggtggcgcggggtaaactgggaaagtgatgtcgtgtactggctccgcctttttcccgagggtgggggagaaccgtatataagtgcagtagtcgccgtgaacgttctttttcgcaacgggtttgccgccagaacacaggtaagtgccgtgtgtggttcccgcgggcctggcctctttacgggttatggcccttgcgtgccttgaattacttccacctggctgcagtacgtgattcttgatcccgagcttcgggttggaagtgggtgggagagttcgaggccttgcgcttaaggagccccttcgcctcgtgcttgagttgaggcctggcctgggcgctggggccgccgcgtgcgaatctggtggcaccttcgcgcctgtctcgctgctttcgataagtctctagccatttaaaatttttgatgacctgctgcgacgctttttttctggcaagatagtcttgtaaatgcgggccaagatctgcacactggtatttcggtttttggggccgcgggcggcgacggggcccgtgcgtcccagcgcacatgttcggcgaggcggggcctgcgagcgcggccaccgagaatcggacgggggtagtctcaagctggccggcctgctctggtgcctggcctcgcgccgccgtgtatcgccccgccctgggcggcaaggctggcccggtcggcaccagttgcgtgagcggaaagatggccgcttcccggccctgctgcagggagctcaaaatggaggacgcggcgctcgggagagcgggcgggtgagtcacccacacaaaggaaaagggcctttccgtcctcagccgtcgcttcatgtgactccacggagtaccgggcgccgtccaggcacctcgattagttctcgagcttttggagtacgtcgtctttaggttggggggaggggttttatgcgatggagtttccccacactgagtgggtggagactgaagttaggccagcttggcacttgatgtaattctccttggaatttgccctttttgagtttggatcttggttcattctcaagcctcagacagtggttcaaagtttttttcttccatttcaggtgtcgtga

SEQ ID NO: 2 - protein, 21 aa, synthetic construct
  REGION 1..21: note = Description of Artificial Sequence: Synthetic peptide
MALPVTALLLPLALLLHAARP

SEQ ID NO: 3 - DNA, 63 bp, synthetic construct
  misc_feature 1..63: note = Description of Artificial Sequence: Synthetic oligonucleotide
  source 1..63: mol_type = other DNA
atggccctgcctgtgacagccctgctgctgcctctggctctgctgctgcatgccgctagaccc

SEQ ID NO: 4 - protein, 45 aa, synthetic construct
  REGION 1..45: note = Description of Artificial Sequence: Synthetic polypeptide
TTTPAPRPPTPAPTIASQPLSLRPEACRPAAGGAVHTRGLDFACD

SEQ ID NO: 5 - DNA, 135 bp, synthetic construct
  misc_feature 1..135: note = Description of Artificial Sequence: Synthetic polynucleotide
  source 1..135: mol_type = other DNA
accacgacgccagcgccgcgaccaccaacaccggcgcccaccatcgcgtcgcagcccctgtccctgcgcccagaggcgtgccggccagcggcggggggcgcagtgcacacgagggggctggacttcgcctgtgat

SEQ ID NO: 6 - protein, 230 aa, synthetic construct
  REGION 1..230: note = Description of Artificial Sequence: Synthetic polypeptide
ESKYGPPCPPCPAPEFLGGPSVFLFPPKPKDTLMISRTPEVTCVVVDVSQEDPEVQFNWYVDGVEVHNAKTKPREEQFNSTYRVVSVLTVLHQDWLNGKEYKCKVSNKGLPSSIEKTISKAKGQPREPQVYTLPPSQEEMTKNQVSLTCLVKGFYPSDIAVEWESNGQPENNYKTTPPVLDSDGSFFLYSRLTVDKSRWQEGNVFSCSVMHEALHNHYTQKSLSLSLGKM

SEQ ID NO: 7 - DNA, 690 bp, synthetic construct
  misc_feature 1..690: note = Description of Artificial Sequence: Synthetic polynucleotide
  source 1..690: mol_type = other DNA
gagagcaagtacggccctccctgccccccttgccctgcccccgagttcctgggcggacccagcgtgttcctgttcccccccaagcccaaggacaccctgatgatcagccggacccccgaggtgacctgtgtggtggtggacgtgtcccaggaggaccccgaggtccagttcaactggtacgtggacggcgtggaggtgcacaacgccaagaccaagccccgggaggagcagttcaatagcacctaccgggtggtgtccgtgctgaccgtgctgcaccaggactggctgaacggcaaggaatacaagtgtaaggtgtccaacaagggcctgcccagcagcatcgagaaaaccatcagcaaggccaagggccagcctcgggagccccaggtgtacaccctgccccctagccaagaggagatgaccaagaaccaggtgtccctgacctgcctggtgaagggcttctaccccagcgacatcgccgtggagtgggagagcaacggccagcccgagaacaactacaagaccaccccccctgtgctggacagcgacggcagcttcttcctgtacagccggctgaccgtggacaagagccggtggcaggagggcaacgtctttagctgctccgtgatgcacgaggccctgcacaaccactacacccagaagagcctgagcctgtccctgggcaagatg

SEQ ID NO: 8 - protein, 282 aa, synthetic construct
  REGION 1..282: note = Description of Artificial Sequence: Synthetic polypeptide
RWPESPKAQASSVPTAQPQAEGSLAKATTAPATTRNTGRGGEEKKKEKEKEEQEERETKTPECPSHTQPLGVYLLTPAVQDLWLRDKATFTCFVVGSDLKDAHLTWEVAGKVPTGGVEEGLLERHSNGSQSQHSRLTLPRSLWNAGTSVTCTLNHPSLPPQRLMALREPAAQAPVKLSLNLLASSDPPEAASWLLCEVSGFSPPNILLMWLEDQREVNTSGFAPARPPPQPGSTTFWAWSVLRVPAPPSPQPATYTCVVSHEDSRTLLNASRSLEVSYVTDH

SEQ ID NO: 9 - DNA, 847 bp, synthetic construct
  misc_feature 1..847: note = Description of Artificial Sequence: Synthetic polynucleotide
  source 1..847: mol_type = other DNA
aggtggcccgaaagtcccaaggcccaggcatctagtgttcctactgcacagccccaggcagaaggcagcctagccaaagctactactgcacctgccactacgcgcaatactggccgtggcggggaggagaagaaaaaggagaaagagaaagaagaacaggaagagagggagaccaagacccctgaatgtccatcccatacccagccgctgggcgtctatctcttgactcccgcagtacaggacttgtggcttagagataaggccacctttacatgtttcgtcgtgggctctgacctgaaggatgcccatttgacttgggaggttgccggaaaggtacccacagggggggttgaggaagggttgctggagcgccattccaatggctctcagagccagcactcaagactcacccttccgagatccctgtggaacgccgggacctctgtcacatgtactctaaatcatcctagcctgcccccacagcgtctgatggcccttagagagccagccgcccaggcaccagttaagcttagcctgaatctgctcgccagtagtgatcccccagaggccgccagctggctcttatgcgaagtgtccggctttagcccgcccaacatcttgctcatgtggctggaggaccagcgagaagtgaacaccagcggcttcgctccagcccggcccccaccccagccgggttctaccacattctgggcctggagtgtcttaagggtcccagcaccacctagcccccagccagccacatacacctgtgttgtgtcccatgaagatagcaggaccctgctaaatgcttctaggagtctggaggtttcctacgtgactgaccatt

SEQ ID NO: 10 - protein, 10 aa, synthetic construct
  REGION 1..10: note = Description of Artificial Sequence: Synthetic peptide
GGGGSGGGGS

SEQ ID NO: 11 - DNA, 30 bp, synthetic construct
  misc_feature 1..30: note = Description of Artificial Sequence: Synthetic oligonucleotide
  source 1..30: mol_type = other DNA
ggtggcggaggttctggaggtggaggttcc

SEQ ID NO: 12 - protein, 24 aa, synthetic construct
  REGION 1..24: note = Description of Artificial Sequence: Synthetic peptide
IYIWAPLAGTCGVLLLSLVITLYC

SEQ ID NO: 13 - DNA, 72 bp, synthetic construct
  misc_feature 1..72: note = Description of Artificial Sequence: Synthetic oligonucleotide
  source 1..72: mol_type = other DNA
atctacatctgggcgcccttggccgggacttgtggggtccttctcctgtcactggttatcaccctttactgc

SEQ ID NO: 14 - protein, 42 aa, synthetic construct
  REGION 1..42: note = Description of Artificial Sequence: Synthetic polypeptide
KRGRKKLLYIFKQPFMRPVQTTQEEDGCSCRFPEEEEGGCEL

SEQ ID NO: 15 - DNA, 126 bp, synthetic construct
  misc_feature 1..126: note = Description of Artificial Sequence: Synthetic polynucleotide
  source 1..126: mol_type = other DNA
aaacggggcagaaagaaactcctgtatatattcaaacaaccatttatgagaccagtacaaactactcaagaggaagatggctgtagctgccgatttccagaagaagaagaaggaggatgtgaactg

SEQ ID NO: 16 - protein, 48 aa, synthetic construct
  REGION 1..48: note = Description of Artificial Sequence: Synthetic polypeptide
QRRKYRSNKGESPVEPAEPCRYSCPREEEGSTIPIQEDYRKPEPACSP

SEQ ID NO: 17 - DNA, 123 bp, synthetic construct
  misc_feature 1..123: note = Description of Artificial Sequence: Synthetic polynucleotide
  source 1..123: mol_type = other DNA
aggagtaagaggagcaggctcctgcacagtgactacatgaacatgactccccgccgccccgggcccacccgcaagcattaccagccctatgccccaccacgcgacttcgcagcctatcgctcc

SEQ ID NO: 18 - protein, 112 aa, synthetic construct
  REGION 1..112: note = Description of Artificial Sequence: Synthetic polypeptide
RVKFSRSADAPAYKQGQNQLYNELNLGRREEYDVLDKRRGRDPEMGGKPRRKNPQEGLYNELQKDKMAEAYSEIGMKGERRRGKGHDGLYQGLSTATKDTYDALHMQALPPR

SEQ ID NO: 19 - DNA, 336 bp, synthetic construct
  misc_feature 1..336: note = Description of Artificial Sequence: Synthetic polynucleotide
  source 1..336: mol_type = other DNA
agagtgaagttcagcaggagcgcagacgcccccgcgtacaagcagggccagaaccagctctataacgagctcaatctaggacgaagagaggagtacgatgttttggacaagagacgtggccgggaccctgagatggggggaaagccgagaaggaagaaccctcaggaaggcctgtacaatgaactgcagaaagataagatggcggaggcctacagtgagattgggatgaaaggcgagcgccggaggggcaaggggcacgatggcctttaccagggtctcagtacagccaccaaggacacctacgacgcccttcacatgcaggccctgccccctcgc

SEQ ID NO: 20 - protein, 112 aa, synthetic construct
  REGION 1..112: note = Description of Artificial Sequence: Synthetic polypeptide
RVKFSRSADAPAYQQGQNQLYNELNLGRREEYDVLDKRRGRDPEMGGKPRRKNPQEGLYNELQKDKMAEAYSEIGMKGERRRGKGHDGLYQGLSTATKDTYDALHMQALPPR

SEQ ID NO: 21 - DNA, 336 bp, synthetic construct
  misc_feature 1..336: note = Description of Artificial Sequence: Synthetic polynucleotide
  source 1..336: mol_type = other DNA
agagtgaagttcagcaggagcgcagacgcccccgcgtaccagcagggccagaaccagctctataacgagctcaatctaggacgaagagaggagtacgatgttttggacaagagacgtggccgggaccctgagatggggggaaagccgagaaggaagaaccctcaggaaggcctgtacaatgaactgcagaaagataagatggcggaggcctacagtgagattgggatgaaaggcgagcgccggaggggcaaggggcacgatggcctttaccagggtctcagtacagccaccaaggacacctacgacgcccttcacatgcaggccctgccccctcgc

SEQ ID NO: 22 - protein, 5 aa, synthetic construct
  REGION 1..5: note = Description of Artificial Sequence: Synthetic peptide
GGGGS

SEQ ID NO: 23 - DNA, 30 bp, synthetic construct; identical to SEQ ID NO: 11
  misc_feature 1..30: note = Description of Artificial Sequence: Synthetic oligonucleotide
  source 1..30: mol_type = other DNA

SEQ ID NO: 24 - protein, 150 aa, synthetic construct [sequence omitted]

SEQ ID NO: 25 - DNA, 450 bp, synthetic construct
  misc_feature 1..450: note = Description of Artificial Sequence: Synthetic polynucleotide
  source 1..450: mol_type = other DNA
cccggatggtttctggactctccggatcgcccgtggaatcccccaaccttctcaccggcactcttggttgtgactgagggcgataatgcgaccttcacgtgctcgttctccaacacctccgaatcattcgtgctgaactggtaccgcatgagcccgtcaaaccagaccgacaagctcgccgcgtttccggaagatcggtcgcaaccgggacaggattgtcggttccgcgtgactcaactgccgaatggcagagacttccacatgagcgtggtccgcgctaggcgaaacgactccgggacctacctgtgcggagccatctcgctggcgcctaaggcccaaatcaaagagagcttgagggccgaactgagagtgaccgagcgcagagctgaggtgccaactgcacatccatccccatcgcctcggcctgcggggcagtttcagaccctggtc

SEQ ID NO: 26 - protein, 394 aa, synthetic construct
  REGION 1..394: note = Description of Artificial Sequence: Synthetic polypeptide
MALPVTALLLPLALLLHAARPPGWFLDSPDRPWNPPTFSPALLVVTEGDNATFTCSFSNTSESFVLNWYRMSPSNQTDKLAAFPEDRSQPGQDCRFRVTQLPNGRDFHMSVVRARRNDSGTYLCGAISLAPKAQIKESLRAELRVTERRAEVPTAHPSPSPRPAGQFQTLVTTTPAPRPPTPAPTIASQPLSLRPEACRPAAGGAVHTRGLDFACDIYIWAPLAGTCGVLLLSLVITLYCKRGRKKLLYIFKQPFMRPVQTTQEEDGCSCRFPEEEEGGCELRVKFSRSADAPAYKQGQNQLYNELNLGRREEYDVLDKRRGRDPEMGGKPRRKNPQEGLYNELQKDKMAEAYSEIGMKGERRRGKGHDGLYQGLSTATKDTYDALHMQALPPR

SEQ ID NO: 27 - DNA, 1182 bp, synthetic construct
  misc_feature 1..1182: note = Description of Artificial Sequence: Synthetic polynucleotide
  source 1..1182: mol_type = other DNA
atggccctccctgtcactgccctgcttctccccctcgcactcctgctccacgccgctagaccacccggatggtttctggactctccggatcgcccgtggaatcccccaaccttctcaccggcactcttggttgtgactgagggcgataatgcgaccttcacgtgctcgttctccaacacctccgaatcattcgtgctgaactggtaccgcatgagcccgtcaaaccagaccgacaagctcgccgcgtttccggaagatcggtcgcaaccgggacaggattgtcggttccgcgtgactcaactgccgaatggcagagacttccacatgagcgtggtccgcgctaggcgaaacgactccgggacctacctgtgcggagccatctcgctggcgcctaaggcccaaatcaaagagagcttgagggccgaactgagagtgaccgagcgcagagctgaggtgccaactgcacatccatccccatcgcctcggcctgcggggcagtttcagaccctggtcacgaccactccggcgccgcgcccaccgactccggccccaactatcgcgagccagcccctgtcgctgaggccggaagcatgccgccctgccgccggaggtgctgtgcatacccggggattggacttcgcatgcgacatctacatttgggctcctctcgccggaacttgtggcgtgctccttctgtccctggtcatcaccctgtactgcaagcggggtcggaaaaagcttctgtacattttcaagcagcccttcatgaggcccgtgcaaaccacccaggaggaggacggttgctcctgccggttccccgaagaggaagaaggaggttgcgagctgcgcgtgaagttctcccggagcgccgacgcccccgcctataagcagggccagaaccagctgtacaacgaactgaacctgggacggcgggaagagtacgatgtgctggacaagcggcgcggccgggaccccgaaatgggcgggaagcctagaagaaagaaccctcaggaaggcctgtataacgagctgcagaaggacaagatggccgaggcctactccgaaattgggatgaagggagagcggcggaggggaaaggggcacgacggcctgtaccaaggactgtccaccgccaccaaggacacatacgatgccctgcacatgcaggcccttccccctcgc

SEQ ID NO: 28 - protein, 40 aa, synthetic construct
  REGION 1..40: note = Description of Artificial Sequence: Synthetic polypeptide
  VARIANT 1..40: note = MISC_FEATURE - This sequence may encompass 1-10 'Gly Gly Gly Ser' repeating units, wherein some positions may be absent
GGGSGGGSGGGSGGGSGGGSGGGSGGGSGGGSGGGSGGGS

SEQ ID NO: 29 - protein, 20 aa, synthetic construct
  REGION 1..20: note = Description of Artificial Sequence: Synthetic peptide
GGGGSGGGGSGGGGSGGGGS

SEQ ID NO: 30 - protein, 15 aa, synthetic construct
  REGION 1..15: note = Description of Artificial Sequence: Synthetic peptide
GGGGSGGGGSGGGGS

SEQ ID NO: 31 - protein, 4 aa, synthetic construct
  REGION 1..4: note = Description of Artificial Sequence: Synthetic peptide
GGGS

SEQ ID NO: 32 - DNA, 2000 bp, synthetic construct
  misc_feature 1..2000: note = Description of Artificial Sequence: Synthetic polynucleotide
  misc_difference 1..2000: note = This sequence may encompass 50-2000 nucleotides, wherein some positions may be absent
  source 1..2000: mol_type = other DNA
aaaaaaaaaaaaaaaaaaaaaaaaaaaaaaaaaaaaaaaaaaaaaaaaaaaaaaaaaaaaaaaaaaaaaaaaaaaaaaaaaaaaaaaaaaaaaaaaaaaaaaaaaaaaaaaaaaaaaaaaaaaaaaaaaaaaaaaaaaaaaaaaaaaaaaaaaaaaaaaaaaaaaaaaaaaaaaaaaaaaaaaaaaaaaaaaaaaaaaaaaaaaaaaaaaaaaaaaaaaaaaaaaaaaaaaaaaaaaaaaaaaaaaaaaaaaaaaaaaaaaaaaaaaaaaaaaaaaaaaaaaaaaaaaaaaaaaaaaaaaaaaaaaaaaaaaaaaaaaaaaaaaaaaaaaaaaaaaaaaaaaaaaaaaaaaaaaaaaaaaaaaaaaaaaaaaaaaaaaaaaaaaaaaaaaaaaaaaaaaaaaaaaaaaaaaaaaaaaaaaaaaaaaaaaaaaaaaaaaaaaaaaaaaaaaaaaaaaaaaaaaaaaaaaaaaaaaaaaaaaaaaaaaaaaaaaaaaaaaaaaaaaaaaaaaaaaaaaaaaaaaaaaaaaaaaaaaaaaaaaaaaaaaaaaaaaaaaaaaaaaaaaaaaaaaaaaaaaaaaaaaaaaaaaaaaaaaaaaaaaaaaaaaaaaaaaaaaaaaaaaaaaaaaaaaaaaaaaaaaaaaaaaaaaaaaaaaaaaaaaaaaaaaaaaaaaaaaaaaaaaaaaaaaaaaaaaaaaaaaaaaaaaaaaaaaaaaaaaaaaaaaaaaaaaaaaaaaaaaaaaaaaaaaaaaaaaaaaaaaaaaaaaaaaaaaaaaaaaaaaaaaaaaaaaaaaaaaaaaaaaaaaaaaaaaaaaaaaaaaaaaaaaaaaaaaaaaaaaaaaaaaaaaaaaaaaaaaaaaaaaaaaaaaaaaaaaaaaaaaaaaaaaaaaaaaaaaaaaaaaaaaaaaaaaaaaaaaaaaaaaaaaaaaaaaaaaaaaaaaaaaaaaaaaaaaaaaaaaaaaaaaaaaaaaaaaaaaaaaaaaaaaaaaaaaaaaaaaaaaaaaaaaaaaaaaaaaaaaaaaaaaaaaaaaaaaaaaaaaaaaaaaaaaaaaaaaaaaaaaaaaaaaaaaaaaaaaaaaaaaaaaaaaaaaaaaaaaaaaaaaaaaaaaaaaaaaaaaaaaaaaaaaaaaaaaaaaaaaaaaaaaaaaaaaaaaaaaaaaaaaaaaaaaaaaaaaaaaaaaaaaaaaaaaaaaaaaaaaaaaaaaaaaaaaaaaaaaaaaaaaaaaaaaaaaaaaaaaaaaaaaaaaaaaaaaaaaaaaaaaaaaaaaaaaaaaaaaaaaaaaaaaaaaaaaaaaaaaaaaaaaaaaaaaaaaaaaaaaaaaaaaaaaaaaaaaaaaaaaaaaaaaaaaaaaaaaaaaaaaaaaaaaaaaaaaaaaaaaaaaaaaaaaaaaaaaaaaaaaaaaaaaaaaaaaaaaaaaaaaaaaaaaaaaaaaaaaaaaaaaaaaaaaaaaaaaaaaaaaaaaaaaaaaaaaaaaaaaaaaaaaaaaaaaaaaaaaaaaaaaaaaaaaaaaaaaaaaaaaaaaaaaaaaaaaaaaaaaaaaaaaaaaaaaaaaaaaaaaaaaaaaaaaaaaaaaaaaaaaaaaaaaaaaaaaaaaaaaaaaaaaaaaaaaaaaaaaaaaaaaaaaaaaaaaaaaaaaaaaaaaaaaaaaaaaaaaaaaaaaaaaaaaaaaaaaaaaaaaaaaaaaaaaaaaaaaaaaaaaaaaaaaaaaaaaaaaaaaaaaaaaaaaaaaaaaaaaaaaaaaaaaaaaaaaaaaaaaaaaaaaaaaaaaaaaaaaaaaaaaaaaaaaaaaaaaaaaaaaaaaaaaaaaaaaaaaaaaaaaaaaaaaaaaaaaaaaaaaaaaaaaaaaaaaaaaaaaaaaaaaaaaaaaaaaaaaaaaaaaaaaaaaaaaaaaaaaaaaaaaaaaaaaaaaaaaaaaaaaaaaaaaaaaaaaaaaaaaaaaaaaaaaaaaaaaaaaaaaaaaaaaaaaaaaaaaaaaaaaaaaaaaaaaaaaaaaaaaaaaaa

SEQ ID NO: 33 - skipped

SEQ ID NO: 34 - DNA, 5000 bp, synthetic construct
  misc_feature 1..5000: note = Description of Artificial Sequence: Synthetic polynucleotide
  misc_difference 1..5000: note = This sequence may encompass 50-5000 nucleotides, wherein some positions may be absent
  misc_feature 1..5000: note = See specification as filed for detailed description of substitutions and preferred embodiments
  source 1..5000: mol_type = other DNA
aaaaaaaaaaaaaaaaaaaaaaaaaaaaaaaaaaaaaaaaaaaaaaaaaaaaaaaaaaaaaaaaaaaaaaaaaaaaaaaaaaaaaaaaaaaaaaaaaaaaaaaaaaaaaaaaaaaaaaaaaaaaaaaaaaaaaaaaaaaaaaaaaaaaaaaaaaaaaaaaaaaaaaaaaaaaaaaaaaaaaaaaaaaaaaaaaaaaaaaaaaaaaaaaaaaaaaaaaaaaaaaaaaaaaaaaaaaaaaaaaaaaaaaaaaaaaaaaaaaaaaaaaaaaaaaaaaaaaaaaaaaaaaaaaaaaaaaaaaaaaaaaaaaaaaaaaaaaaaaaaaaaaaaaaaaaaaaaaaaaaaaaaaaaaaaaaaaaaaaaaaaaaaaaaaaaaaaaaaaaaaaaaaaaaaaaaaaaaaaaaaaaaaaaaaaaaaaaaaaaaaaaaaaaaaaaaaaaaaaaaaaaaaaaaaaaaaaaaaaaaaaaaaaaaaaaaaaaaaaaaaaaaaaaaaaaaaaaaaaaaaaaaaaaaaaaaaaaaaaaaaaaaaaaaaaaaaaaaaaaaaaaaaaaaaaaaaaaaaaaaaaaaaaaaaaaaaaaaaaaaaaaaaaaaaaaaaaaaaaaaaaaaaaaaaaaaaaaaaaaaaaaaaaaaaaaaaaaaaaaaaaaaaaaaaaaaaaaaaaaaaaaaaaaaaaaaaaaaaaaaaaaaaaaaaaaaaaaaaaaaaaaaaaaaaaaaaaaaaaaaaaaaaaaaaaaaaaaaaaaaaaaaaaaaaaaaaaaaaaaaaaaaaaaaaaaaaaaaaaaaaaaaaaaaaaaaaaaaaaaaaaaaaaaaaaaaaaaaaaaaaaaaaaaaaaaaaaaaaaaaaaaaaaaaaaaaaaaaaaaaaaaaaaaaaaaaaaaaaaaaaaaaaaaaaaaaaaaaaaaaaaaaaaaaaaaaaaaaaaaaaaaaaaaaaaaaaaaaaaaaaaaaaaaaaaaaaaaaaaaaaaaaaaaaaaaaaaaaaaaaaaaaaaaaaaaaaaaaaaaaaaaaaaaaaaaaaaaaaaaaaaaaaaaaaaaaaaaaaaaaaaaaaaaaaaaaaaaaaaaaaaaaaaaaaaaaaaaaaaaaaaaaaaaaaaaaaaaaaaaaaaaaaaaaaaaaaaaaaaaaaaaaaaaaaaaaaaaaaaaaaaaaaaaaaaaaaaaaaaaaaaaaaaaaaaaaaaaaaaaaaaaaaaaaaaaaaaaaaaaaaaaaaaaaaaaaaaaaaaaaaaaaaaaaaaaaaaaaaaaaaaaaaaaaaaaaaaaaaaaaaaaaaaaaaaaaaaaaaaaaaaaaaaaaaaaaaaaaaaaaaaaaaaaaaaaaaaaaaaaaaaaaaaaaaaaaaaaaaaaaaaaaaaaaaaaaaaaaaaaaaaaaaaaaaaaaaaaaaaaaaaaaaaaaaaaaaaaaaaaaaaaaaaaaaaaaaaaaaaaaaaaaaaaaaaaaaaaaaaaaaaaaaaaaaaaaaaaaaaaaaaaaaaaaaaaaaaaaaaaaaaaaaaaaaaaaaaaaaaaaaaaaaaaaaaaaaaaaaaaaaaaaaaaaaaaaaaaaaaaaaaaaaaaaaaaaaaaaaaaaaaaaaaaaaaaaaaaaaaaaaaaaaaaaaaaaaaaaaaaaaaaaaaaaaaaaaaaaaaaaaaaaaaaaaaaaaaaaaaaaaaaaaaaaaaaaaaaaaaaaaaaaaaaaaaaaaaaaaaaaaaaaaaaaaaaaaaaaaaaaaaaaaaaaaaaaaaaaaaaaaaaaaaaaaaaaaaaaaaaaaaaaaaaaaaaaaaaaaaaaaaaaaaaaaaaaaaaaaaaaaaaaaaaaaaaaaaaaaaaaaaaaaaaaaaaaaaaaaaaaaaaaaaaaaaaaaaaaaaaaaaaaaaaaaaaaaaaaaaaaaaaaaaaaaaaaaaaaaaaaaaaaaaaaaaaaaaaaaaaaaaaaaaaaaaaaaaaaaaaaaaaaaaaaaaaaaaaaaaaaaaaaaaaaaaaaaaaaaaaaaaaaaaaaaaaaaaaaaaaaaaaaaaaaaaaaaaaaaaaaaaaaaaaaaaaaaaaaaaaaaaaaaaaaaaaaaaaaaaaaaaaaaaaaaaaaaaaaaaaaaaaaaaaaaaaaaaaaaaaaaaaaaaaaaaaaaaaaaaaaaaaaaaaaaaaaaaaaaaaaaaaaaaaaaaaaaaaaaaaaaaaaaaaaaaaaaaaaaaaaaaaaaaaaaaaaaaaaaaaaaaaaaaaaaaaaaaaaaaaaaaaaaaaaaaaaaaaaaaaaaaaaaaaaaaaaaaaaaaaaaaaaaaaaaaaaaaaaaaaaaaaaaaaaaaaaaaaaaaaaaaaaaaaaaaaaaaaaaaaaaaaaaaaaaaaaaaaaaaaaaaaaaaaaaaaaaaaaaaaaaaaaaaaaaaaaaaaaaaaaaaaaaaaaaaaaaaaaaaaaaaaaaaaaaaaaaaaaaaaaaaaaaaaaaaaaaaaaaaaaaaaaaaaaaaaaaaaaaaaaaaaaaaaaaaaaaaaaaaaaaaaaaaaaaaaaaaaaaaaaaaaaaaaaaaaaaaaaaaaaaaaaaaaaaaaaaaaaaaaaaaaaaaaaaaaaaaaaaaaaaaaaaaaaaaaaaaaaaaaaaaaaaaaaaaaaaaaaaaaaaaaaaaaaaaaaaaaaaaaaaaaaaaaaaaaaaaaaaaaaaaaaaaaaaaaaaaaaaaaaaaaaaaaaaaaaaaaaaaaaaaaaaaaaaaaaaaaaaaaaaaaaaaaaaaaaaaaaaaaaaaaaaaaaaaaaaaaaaaaaaaaaaaaaaaaaaaaaaaaaaaaaaaaaaaaaaaaaaaaaaaaaaaaaaaaaaaaaaaaaaaaaaaaaaaaaaaaaaaaaaaaaaaaaaaaaaaaaaaaaaaaaaaaaaaaaaaaaaaaaaaaaaaaaaaaaaaaaaaaaaaaaaaaaaaaaaaaaaaaaaaaaaaaaaaaaaaaaaaaaaaaaaaaaaaaaaaaaaaaaaaaaaaaaaaaaaaaaaaaaaaaaaaaaaaaaaaaaaaaaaaaaaaaaaaaaaaaaaaaaaaaaaaaaaaaaaaaaaaaaaaaaaaaaaaaaaaaaaaaaaaaaaaaaaaaaaaaaaaaaaaaaaaaaaaaaaaaaaaaaaaaaaaaaaaaaaaaaaaaaaaaaaaaaaaaaaaaaaaaaaaaaaaaaaaaaaaaaaaaaaaaaaaaaaaaaaaaaaaaaaaaaaaaaaaaaaaaaaaaaaaaaaaaaaaaaaaaaaaaaaaaaaaaaaaaaaaaaaaaaaaaaaaaaaaaaaaaaaaaaaaaaaaaaaaaaaaaaaaaaaaaaaaaaaaaaaaaaaaaaaaaaaaaaaaaaaaaaaaaaaaaaaaaaaaaaaaaaaaaaaaaaaaaaaaaaaaaaaaaaaaaaaaaaaaaaaaaaaaaaaaaaaaaaaaaaaaaaaaaaaaaaaaaaaaaaaaaaaaaaaaaaaaaaaaaaaaaaaaaaaaaaaaaaaaaaaaaaaaaaaaaaaaaaaaaaaaaaaaaaaaaaaaaaaaaaaaaaaaaaaaaaaaaaaaaaaaaaaaaaaaaaaaaaaaaaaaaaaaaaaaaaaaaaaaaaaaaaaaaaaaaaaaaaaaaaaaaaaaaaaaaaaaaaaaaaaaaaaaaaaaaaaaaaaaaaaaaaaaaaaaaaaaaaaaaaaaaaaaaaaaaaaaaaaaaaaaaaaaaaaaaaaaaaaaaaaaaaaaaaaaaaaaaaaaaaaaaaaaaaaaaaaaaaaaaaaaaaaaaaaaaaaaaaaaaaaaaaaaaaaaaaaaaaaaaaaaaaaaaaaaaaaaaaaaaaaaaaaaaaaaaaaaaaaaaaaaaaaaaaaaaaaaaaaaaaaaaaaaaaaaaaaaaaaaaaaaaaaaaaaaaaaaaaaaaaaaaaaaaaaaaaaaaaaaaaaaaaaaaaaaaaaaaaaaaaaaaaaaaaaaaaaaaaaaaaaaaaaaaaaaaaaaaaaaaaaaaaaaaaaaaaaaaaaaaaaaaaaaaaaaaaaaaaaaaaaaaaaaaaaaaaaaaaaaaaaaaaaaaaaaaaaaaaaaaaaaaaaaaaaaaaaaaaaaaaaaaaaaaaaaaaaaaaaaaaaaaaaaaaaaaaaaaaaaaaaaaaaaaaaaaaaaaaaaaaaaaaaaaaaaaaaaaaaaaaaaaaaaaaaaaaaaaaaaaaaaaaaaaaaaaaaaaaaaaaaaaaaaaaaaaaaaaaaaaaaaaaaaaaaaaaaaaaaaaaaaaaaaaaaaaaaaaaaaaaaaaaaaaaaaaaaaaaaaaaaaaaaaaaaaaaaaaaaaaaaaaaaaaaaaaaaaaaaaaaaaaaaaaaaaaaaaaaaaaaaaaaaaaaaaaaaaaaaaaaaaaaaaaaaaaaaaaaaaaaaaaaaaaaaaaaaaaaaaaaaaaaaaaaaaaaaaaaaaaaaaaaaaaaaaaaaaaaaaaaaaaaaaaaaaaaaaaaaaaaaaaaaaaaaaaaaaaaaaaaaaaaaaaaaaaaaaaaaaaaaaaaaaaaaaaaaaaaaaaaaaaaaaaaaaaaaaaaaaaaaaaaaaaaaaaaaaaaaaaaaaaaaaaaaaaaaaaaaaaaaaaaaaaaaaaaaaaaaaaaaaaaaaaaaaaaaaaaaaaaaaaaaaaaaaaaaaaaaaaaaaaaaaaaaaaaaaaaaaaaaaaaaaaaaaaaaaaaaaaaaaaaaaaaaaaaaaaaaaaaaaaaaaaaaaaaaaaaaaaaaaaaaaaaaaaaaaaaaaaaaaaaaaaaaaaaaaaaaaaaaaaaaaaaaaaaaaaaaaaaaaaaaaaaaaaaaaaaaaaaaaaaaaaaaaaaaaaaaaaaaaaaaaaaaaaaaaaaaaaaaaaaaaaaaaaaaaaaaaaaaaaaaaaaaaaaaaaaaaaaaaaaaaaaaaaaaaaaaaaaaaaaaaaaaaaaaaaaaaaaaaaaaaaaaaaaaaaaaaaaaaaaaaaaaaaaaaaaaaaaaaaaaaaaaaaaaaaaaaaaaaaaaaaaaaaaaaaaaaaaaaaaaaaaaaaaaaaaaaaaaaaaaaaaaaaaaaaaaaaaaaaaaaaaaaaaaaaaaaaaaaaaaaaaaaaaaaaaaaaaaaaaaaa

SEQ ID NO: 35-38 - skipped (4 entries)

SEQ ID NO: 39 - protein, 373 aa, synthetic construct
  REGION 1..373: note = Description of Artificial Sequence: Synthetic polypeptide
PGWFLDSPDRPWNPPTFSPALLVVTEGDNATFTCSFSNTSESFVLNWYRMSPSNQTDKLAAFPEDRSQPGQDCRFRVTQLPNGRDFHMSVVRARRNDSGTYLCGAISLAPKAQIKESLRAELRVTERRAEVPTAHPSPSPRPAGQFQTLVTTTPAPRPPTPAPTIASQPLSLRPEACRPAAGGAVHTRGLDFACDIYIWAPLAGTCGVLLLSLVITLYCKRGRKKLLYIFKQPFMRPVQTTQEEDGCSCRFPEEEEGGCELRVKFSRSADAPAYKQGQNQLYNELNLGRREEYDVLDKRRGRDPEMGGKPRRKNPQEGLYNELQKDKMAEAYSEIGMKGERRRGKGHDGLYQGLSTATKDTYDALHMQALPPR

SEQ ID NO: 40 - protein, 852 aa, Homo sapiens
MLSGKKAAAAAAAAAAAATGTEAGPGTAGGSENGSEVAAQPAGLSGPAEVGPGAVGERTPRKKEPPRASPPGGLAEPPGSAGPQAGPTVVPGSATPMETGIAETPEGRRTSRRKRAKVEYREMDESLANLSEDEYYSEEERNAKAEKEKKLPPPPPQAPPEEENESEPEEPSGVEGAAFQSRLPHDRMTSQEAACFPDIISGPQQTQKVFLFIRNRTLQLWLDNPKIQLTFEATLQQLEAPYNSDTVLVHRVHSYLERHGLINFGIYKRIKPLPTKKTGKVIIIGSGVSGLAAARQLQSFGMDVTLLEARDRVGGRVATFRKGNYVADLGAMVVTGLGGNPMAVVSKQVNMELAKIKQKCPLYEANGQAVPKEKDEMVEQEFNRLLEATSYLSHQLDFNVLNNKPVSLGQALEVVIQLQEKHVKDEQIEHWKKIVKTQEELKELLNKMVNLKEKIKELHQQYKEASEVKPPRDITAEFLVKSKHRDLTALCKEYDELAETQGKLEEKLQELEANPPSDVYLSSRDRQILDWHFANLEFANATPLSTLSLKHWDQDDDFEFTGSHLTVRNGYSCVPVALAEGLDIKLNTAVRQVRYTASGCEVIAVNTRSTSQTFIYKCDAVLCTLPLGVLKQQPPAVQFVPPLPEWKTSAVQRMGFGNLNKVVLCFDRVFWDPSVNLFGHVGSTTASRGELFLFWNLYKAPILLALVAGEAAGIMENISDDVIVGRCLAILKGIFGSSAVPQPKETVVSRWRADPWARGSYSYVAAGSSGNDYDLMAQPITPGPSIPGAPQPIPRLFFAGEHTIRNYPATVHGALLSGLREAGRIADQFLGAMYTLPRQATPGVPAQQSPSM

SEQ ID NO: 41 - DNA, 3125 bp, Homo sapiens
  source 1..3125: mol_type = genomic DNA
ggcgcggcgggagcgcgcttggcgcgtgcgtacgcgacggcggttggcggcgcgcgggcagcgtgaagcgaggcgaggcaaggcttttcggacccacggagcgacagagcgagcggcccctacggccgtcggcggcccggcggcccgagatgttatctgggaagaaggcggcagccgcggcggcggcggctgcagcggcagcaaccgggacggaggctggccctgggacagcaggcggctccgagaacgggtctgaggtggccgcgcagcccgcgggcctgtcgggcccagccgaggtcgggccgggggcggtgggggagcgcacaccccgcaagaaagagcctccgcgggcctcgccccccgggggcctggcggaaccgccggggtccgcagggcctcaggccggccctactgtcgtgcctgggtctgcgacccccatggaaactggaatagcagagactccggaggggcgtcggaccagccggcgcaagcgggcgaaggtagagtacagagagatggatgaaagcttggccaacctctcagaagatgagtattattcagaagaagagagaaatgccaaagcagagaaggaaaagaagcttcccccaccaccccctcaagccccacctgaggaagaaaatgaaagtgagcctgaagaaccatcggggcaagcaggaggacttcaagacgacagttctggagggtatggagacggccaagcatcaggtgtggagggcgcagctttccagagccgacttcctcatgaccggatgacttctcaagaagcagcctgttttccagatattatcagtggaccacaacagacccagaaggtttttcttttcattagaaaccgcacactgcagttgtggttggataatccaaagattcagctgacatttgaggctactctccaacaattagaagcaccttataacagtgatactgtgcttgtccaccgagttcacagttatttagagcgtcatggtcttatcaacttcggcatctataagaggataaaacccctaccaactaaaaagacaggaaaggtaattattataggctctggggtctcaggcttggcagcagctcgacagttacaaagttttggaatggatgtcacacttttggaagccagggatcgtgtgggtggacgagttgccacatttcgcaaaggaaactatgtagctgatcttggagccatggtggtaacaggtcttggagggaatcctatggctgtggtcagcaaacaagtaaatatggaactggccaagatcaagcaaaaatgcccactttatgaagccaacggacaagctgacactgtcaaggttcctaaagagaaagatgaaatggtagagcaagagtttaaccggttgctagaagctacatcttaccttagtcatcaactagacttcaatgtcctcaataataagcctgtgtcccttggccaggcattggaagttgtcattcagttacaagagaagcatgtcaaagatgagcagattgaacattggaagaagatagtgaaaactcaggaagaattgaaagaacttcttaataagatggtaaatttgaaagagaaaattaaagaactccatcagcaatacaaagaagcatctgaagtaaagccacccagagatattactgccgagttcttagtgaaaagcaaacacagggatctgaccgccctatgcaaggaatatgatgaattagctgaaacacaaggaaagctagaagaaaaacttcaggagttggaagcgaatcccccaagtgatgtatatctctcatcaagagacagacaaatacttgattggcattttgcaaatcttgaatttgctaatgccacacctctctcaactctctcccttaagcactgggatcaggatgatgactttgagttcactggcagccacctgacagtaaggaatggctactcgtgtgtgcctgtggctttagcagaaggcctagacattaaactgaatacagcagtgcgacaggttcgctacacggcttcaggatgtgaagtgatagctgtgaatacccgctccacgagtcaaacctttatttataaatgcgacgcagttctctgtacccttcccctgggtgtgctgaagcagcagccaccagccgttcagtttgtgccacctctccctgagtggaaaacatctgcagtccaaaggatgggatttggcaaccttaacaaggtggtgttgtgttttgatcgggtgttctgggatccaagtgtcaatttgttcgggcatgttggcagtacgactgccagcaggggtgagctcttcctcttctggaacctctataaagctccaatactgttggcactagtggcaggagaagctgctggtatcatggaaaacataagtgacgatgtgattgttggccgatgcctggccattctcaaagggatttttggtagcagtgcagtacctcagcccaaagaaactgtggtgtctcgttggcgtgctgatccctgggctcggggctcttattcctatgttgctgcaggatcatctggaaatgactatgatttaatggctcagccaatcactcctggcccctcgattccaggtgccccacagccgattccacgactcttctttgcgggagaacatacgatccgtaactacccagccacagtgcatggtgctctgctgagtgggctgcgagaagcgggaagaattgcagaccagtttttgggggccatgtatacgctgcctcgccaggccacaccaggtgttcctgcacagcagtccccaagcatgtgagacagatgcattctaagggaagaggcccatgtgcctgtttctgccatgtaaggaaggctcttctagcaatactagatcccactgagaaaatccaccctggcatctgggctcctgatcagctgatggagctcctgatttgacaaaggagcttgcctcctttgaatgacctagagcacagggaggaacttgtccattagtttggaattgtgttcttcgtaaagactgaggcaagcaagtgctgtgaaataacatcatcttagtcccttggtgtgtggggtttttgttttttttttatattttgagaataaaacttcatataaaattggcaaaaaaaaaaaaaaaaaa

SEQ ID NO: 42 - DNA, 3053 bp, Homo sapiens
  source 1..3053: mol_type = genomic DNA
ggcgcggcgggagcgcgcttggcgcgtgcgtacgcgacggcggttggcggcgcgcgggcagcgtgaagcgaggcgaggcaaggcttttcggacccacggagcgacagagcgagcggcccctacggccgtcggcggcccggcggcccgagatgttatctgggaagaaggcggcagccgcggcggcggcggctgcagcggcagcaaccgggacggaggctggccctgggacagcaggcggctccgagaacgggtctgaggtggccgcgcagcccgcgggcctgtcgggcccagccgaggtcgggccgggggcggtgggggagcgcacaccccgcaagaaagagcctccgcgggcctcgccccccgggggcctggcggaaccgccggggtccgcagggcctcaggccggccctactgtcgtgcctgggtctgcgacccccatggaaactggaatagcagagactccggaggggcgtcggaccagccggcgcaagcgggcgaaggtagagtacagagagatggatgaaagcttggccaacctctcagaagatgagtattattcagaagaagagagaaatgccaaagcagagaaggaaaagaagcttcccccaccaccccctcaagccccacctgaggaagaaaatgaaagtgagcctgaagaaccatcgggtgtggagggcgcagctttccagagccgacttcctcatgaccggatgacttctcaagaagcagcctgttttccagatattatcagtggaccacaacagacccagaaggtttttcttttcattagaaaccgcacactgcagttgtggttggataatccaaagattcagctgacatttgaggctactctccaacaattagaagcaccttataacagtgatactgtgcttgtccaccgagttcacagttatttagagcgtcatggtcttatcaacttcggcatctataagaggataaaacccctaccaactaaaaagacaggaaaggtaattattataggctctggggtctcaggcttggcagcagctcgacagttacaaagttttggaatggatgtcacacttttggaagccagggatcgtgtgggtggacgagttgccacatttcgcaaaggaaactatgtagctgatcttggagccatggtggtaacaggtcttggagggaatcctatggctgtggtcagcaaacaagtaaatatggaactggccaagatcaagcaaaaatgcccactttatgaagccaacggacaagctgttcctaaagagaaagatgaaatggtagagcaagagtttaaccggttgctagaagctacatcttaccttagtcatcaactagacttcaatgtcctcaataataagcctgtgtcccttggccaggcattggaagttgtcattcagttacaagagaagcatgtcaaagatgagcagattgaacattggaagaagatagtgaaaactcaggaagaattgaaagaacttcttaataagatggtaaatttgaaagagaaaattaaagaactccatcagcaatacaaagaagcatctgaagtaaagccacccagagatattactgccgagttcttagtgaaaagcaaacacagggatctgaccgccctatgcaaggaatatgatgaattagctgaaacacaaggaaagctagaagaaaaacttcaggagttggaagcgaatcccccaagtgatgtatatctctcatcaagagacagacaaatacttgattggcattttgcaaatcttgaatttgctaatgccacacctctctcaactctctcccttaagcactgggatcaggatgatgactttgagttcactggcagccacctgacagtaaggaatggctactcgtgtgtgcctgtggctttagcagaaggcctagacattaaactgaatacagcagtgcgacaggttcgctacacggcttcaggatgtgaagtgatagctgtgaatacccgctccacgagtcaaacctttatttataaatgcgacgcagttctctgtacccttcccctgggtgtgctgaagcagcagccaccagccgttcagtttgtgccacctctccctgagtggaaaacatctgcagtccaaaggatgggatttggcaaccttaacaaggtggtgttgtgttttgatcgggtgttctgggatccaagtgtcaatttgttcgggcatgttggcagtacgactgccagcaggggtgagctcttcctcttctggaacctctataaagctccaatactgttggcactagtggcaggagaagctgctggtatcatggaaaacataagtgacgatgtgattgttggccgatgcctggccattctcaaagggatttttggtagcagtgcagtacctcagcccaaagaaactgtggtgtctcgttggcgtgctgatccctgggctcggggctcttattcctatgttgctgcaggatcatctggaaatgactatgatttaatggctcagccaatcactcctggcccctcgattccaggtgccccacagccgattccacgactcttctttgcgggagaacatacgatccgtaactacccagccacagtgcatggtgctctgctgagtgggctgcgagaagcgggaagaattgcagaccagtttttgggggccatgtatacgctgcctcgccaggccacaccaggtgttcctgcacagcagtccccaagcatgtgagacagatgcattctaagggaagaggcccatgtgcctgtttctgccatgtaaggaaggctcttctagcaatactagatcccactgagaaaatccaccctggcatctgggctcctgatcagctgatggagctcctgatttgacaaaggagcttgcctcctttgaatgacctagagcacagggaggaacttgtccattagtttggaattgtgttcttcgtaaagactgaggcaagcaagtgctgtgaaataacatcatcttagtcccttggtgtgtggggtttttgttttttttttatattttgagaataaaacttcatataaaattggcaaaaaaaaaaaaaaaaaa

SEQ ID NO: 43 - DNA, 21 bp, synthetic construct
  misc_feature 1..21: note = Description of Artificial Sequence: Synthetic oligonucleotide
  source 1..21: mol_type = other DNA
ccgagttcacagttatttaga

SEQ ID NO: 44 - DNA, 21 bp, synthetic construct
  misc_feature 1..21: note = Description of Artificial Sequence: Synthetic oligonucleotide
  source 1..21: mol_type = other DNA
cggacaagctgttcctaaaga

SEQ ID NO: 45 - DNA, 21 bp, synthetic construct
  misc_feature 1..21: note = Description of Artificial Sequence: Synthetic oligonucleotide
  source 1..21: mol_type = other DNA
gaattgtgttcttcgtaaaga

SEQ ID NO: 46 - DNA, 21 bp, synthetic construct
  misc_feature 1..21: note = Description of Artificial Sequence: Synthetic oligonucleotide
  source 1..21: mol_type = other DNA
ccaccgagttcacagttattt

SEQ ID NO: 47 - DNA, 21 bp, synthetic construct
  misc_feature 1..21: note = Description of Artificial Sequence: Synthetic oligonucleotide
  source 1..21: mol_type = other DNA
caggaaaggtaattattatag

SEQ ID NO: 48 - DNA, 21 bp, synthetic construct
  misc_feature 1..21: note = Description of Artificial Sequence: Synthetic oligonucleotide
  source 1..21: mol_type = other DNA
gcctgtttctgccatgtaagg

SEQ ID NO: 49 - DNA, 21 bp, synthetic construct
  misc_feature 1..21: note = Description of Artificial Sequence: Synthetic oligonucleotide
  source 1..21: mol_type = other DNA
gacaggaaaggtaattattat

SEQ ID NO: 50 - DNA, 21 bp, synthetic construct
  misc_feature 1..21: note = Description of Artificial Sequence: Synthetic oligonucleotide
  source 1..21: mol_type = other DNA
agctgttcctaaagagaaaga

SEQ ID NO: 51 - DNA, 21 bp, synthetic construct
  misc_feature 1..21: note = Description of Artificial Sequence: Synthetic oligonucleotide
  source 1..21: mol_type = other DNA
cgagtcaaacctttatttata

SEQ ID NO: 52 - DNA, 21 bp, synthetic construct
  misc_feature 1..21: note = Description of Artificial Sequence: Synthetic oligonucleotide
  source 1..21: mol_type = other DNA
ggctactctccaacaattaga

SEQ ID NO: 53 - DNA, 21 bp, synthetic construct
  misc_feature 1..21: note = Description of Artificial Sequence: Synthetic oligonucleotide
  source 1..21: mol_type = other DNA
gcagctcgacagttacaaagt

SEQ ID NO: 54 - DNA, 21 bp, synthetic construct
  misc_feature 1..21: note = Description of Artificial Sequence: Synthetic oligonucleotide
  source 1..21: mol_type = other DNA
cagaaggcctagacattaaac

SEQ ID NO: 55 - DNA, 21 bp, synthetic construct
  misc_feature 1..21: note = Description of Artificial Sequence: Synthetic oligonucleotide
  source 1..21: mol_type = other DNA
agatgagtattattcagaaga

SEQ ID NO: 56 - DNA, 21 bp, synthetic construct
  misc_feature 1..21: note = Description of Artificial Sequence: Synthetic oligonucleotide
  source 1..21: mol_type = other DNA
caattagaagcaccttataac

SEQ ID NO: 57 - DNA, 21 bp, synthetic construct
  misc_feature 1..21: note = Description of Artificial Sequence: Synthetic oligonucleotide
  source 1..21: mol_type = other DNA
ggaacttgtccattagtttgg

SEQ ID NO: 58 - DNA, 21 bp, synthetic construct
  misc_feature 1..21: note = Description of Artificial Sequence: Synthetic oligonucleotide
  source 1..21: mol_type = other DNA
gcaccttataacagtgatact

SEQ ID NO: 59 - DNA, 21 bp, synthetic construct
  misc_feature 1..21: note = Description of Artificial Sequence: Synthetic oligonucleotide
  source 1..21: mol_type = other DNA
ggcatctataagaggataaaa

SEQ ID NO: 60 - DNA, 21 bp, synthetic construct
  misc_feature 1..21: note = Description of Artificial Sequence: Synthetic oligonucleotide
  source 1..21: mol_type = other DNA
cattggaagttgtcattcagt

SEQ ID NO: 61 - DNA, 21 bp, synthetic construct
  misc_feature 1..21: note = Description of Artificial Sequence: Synthetic oligonucleotide
  source 1..21: mol_type = other DNA
tggaaatgactatgatttaat

SEQ ID NO: 62 - DNA, 21 bp, synthetic construct
  misc_feature 1..21: note = Description of Artificial Sequence: Synthetic oligonucleotide
  source 1..21: mol_type = other DNA
cggttgctagaagctacatct

SEQ ID NO: 63 - DNA, 21 bp, synthetic construct
  misc_feature 1..21: note = Description of Artificial Sequence: Synthetic oligonucleotide
  source 1..21: mol_type = other DNA
gccacatttcgcaaaggaaac

SEQ ID NO: 64 - DNA, 21 bp, synthetic construct
  misc_feature 1..21: note = Description of Artificial Sequence: Synthetic oligonucleotide
  source 1..21: mol_type = other DNA
cctcatgaccggatgacttct

SEQ ID NO: 65 - DNA, 21 bp, synthetic construct
  misc_feature 1..21: note = Description of Artificial Sequence: Synthetic oligonucleotide
  source 1..21: mol_type = other DNA
cgagttgccacatttcgcaaa

SEQ ID NO: 66 - DNA, 21 bp, synthetic construct
  misc_feature 1..21: note = Description of Artificial Sequence: Synthetic oligonucleotide
  source 1..21: mol_type = other DNA
cgtcatggtcttatcaacttc

SEQ ID NO: 67 - DNA, 21 bp, synthetic construct
  misc_feature 1..21: note = Description of Artificial Sequence: Synthetic oligonucleotide
  source 1..21: mol_type = other DNA
gagcgtcatggtcttatcaac

SEQ ID NO: 68 - DNA, 21 bp, synthetic construct
  misc_feature 1..21: note = Description of Artificial Sequence: Synthetic oligonucleotide
  source 1..21: mol_type = other DNA
ccggatgacttctcaagaagc

SEQ ID NO: 69 - DNA, 21 bp, synthetic construct
  misc_feature 1..21: note = Description of Artificial Sequence: Synthetic oligonucleotide
  source 1..21: mol_type = other DNA
cacagggaggaacttgtccat

SEQ ID NO: 70 - DNA, 21 bp, synthetic construct
  misc_feature 1..21: note = Description of Artificial Sequence: Synthetic oligonucleotide
  source 1..21: mol_type = other DNA
gcctcctttgaatgacctaga

SEQ ID NO: 71 - DNA, 21 bp, synthetic construct
  misc_feature 1..21: note = Description of Artificial Sequence: Synthetic oligonucleotide
  source 1..21: mol_type = other DNA
cctatggctgtggtcagcaaa

SEQ ID NO: 72 - DNA, 21 bp, synthetic construct
  misc_feature 1..21: note = Description of Artificial Sequence: Synthetic oligonucleotide
  source 1..21: mol_type = other DNA
gagcttgcctcctttgaatga

SEQ ID NO: 73 - DNA, 21 bp, synthetic construct
  misc_feature 1..21: note = Description of Artificial Sequence: Synthetic oligonucleotide
  source 1..21: mol_type = other DNA
caggtcttggagggaatccta

SEQ ID NO: 74 - DNA, 21 bp, synthetic construct
  misc_feature 1..21: note = Description of Artificial Sequence: Synthetic oligonucleotide
  source 1..21: mol_type = other DNA
cagtacctcagcccaaagaaa

SEQ ID NO: 75 - DNA, 21 bp, synthetic construct
  misc_feature 1..21: note = Description of Artificial Sequence: Synthetic oligonucleotide
  source 1..21: mol_type = other DNA
ctggccattctcaaagggatt

SEQ ID NO: 76 - DNA, 21 bp, synthetic construct
  misc_feature 1..21: note = Description of Artificial Sequence: Synthetic oligonucleotide
  source 1..21: mol_type = other DNA
gccatggtggtaacaggtctt

SEQ ID NO: 77 - DNA, 21 bp, synthetic construct
  misc_feature 1..21: note = Description of Artificial Sequence: Synthetic oligonucleotide
  source 1..21: mol_type = other DNA
caggagaagctgctggtatca

SEQ ID NO: 78 - DNA, 21 bp, synthetic construct
  misc_feature 1..21: note = Description of Artificial Sequence: Synthetic oligonucleotide
  source 1..21: mol_type = other DNA
ccacgagtcaaacctttattt

SEQ ID NO: 79 - DNA, 21 bp, synthetic construct
  misc_feature 1..21: note = Description of Artificial Sequence: Synthetic oligonucleotide
  source 1..21: mol_type = other DNA
gctacatcttaccttagtcat

SEQ ID NO: 80 - DNA, 21 bp, synthetic construct
  misc_feature 1..21: note = Description of Artificial Sequence: Synthetic oligonucleotide
  source 1..21: mol_type = other DNA
ccggatgacttctcaagaagc

SEQ ID NO: 81 - DNA, 21 bp, synthetic construct
  misc_feature 1..21: note = Description of Artificial Sequence: Synthetic oligonucleotide
  source 1..21: mol_type = other DNA
gctccaatactgttggcacta

SEQ ID NO: 82 - DNA, 21 bp, synthetic construct
  misc_feature 1..21: note = Description of Artificial Sequence: Synthetic oligonucleotide
  source 1..21: mol_type = other DNA
ccaacaattagaagcacctta

SEQ ID NO: 83 - DNA, 112 bp, synthetic construct
  misc_feature 1..112: note = Description of Artificial Sequence: Synthetic polynucleotide
  source 1..112: mol_type = other DNA
ccgagttcacagttatttagactcgagtctaaataactgtgaactcggttttttgaattcgcaccagcacgctacgcaacacgttgacgttgaccacatgttcgccgtcttc

SEQ ID NO: 84 - DNA, 112 bp, synthetic construct
  misc_feature 1..112: note = Description of Artificial Sequence: Synthetic polynucleotide
  source 1..112: mol_type = other DNA
cggacaagctgttcctaaagactcgagtctttaggaacagcttgtccgttttttgaattcgcaccagcacgctacgcagtcagttgacgttgaccaacgtttcgccgtcttc

SEQ ID NO: 85 - DNA, 112 bp, synthetic construct
  misc_feature 1..112: note = Description of Artificial Sequence: Synthetic polynucleotide
  source 1..112: mol_type = other DNA
gaattgtgttcttcgtaaagactcgagtctttacgaagaacacaattcttttttgaattcgcaccagcacgctacgcatgacgttgacgttgaccaaccattcgccgtcttc

SEQ ID NO: 86 - DNA, 112 bp, synthetic construct
  misc_feature 1..112: note = Description of Artificial Sequence: Synthetic polynucleotide
  source 1..112: mol_type = other DNA
ccaccgagttcacagttatttctcgagaaataactgtgaactcggtggttttttgaattcgcaccagcacgctacgcaacgtgttgacgttgaccaacacttcgccgtcttc

SEQ ID NO: 87 - DNA, 112 bp, synthetic construct
  misc_feature 1..112: note = Description of Artificial Sequence: Synthetic polynucleotide
  source 1..112: mol_type = other DNA
caggaaaggtaattattatagctcgagctataataattacctttcctgttttttgaattcgcaccagcacgctacgcacatggttgacgttgaccaactgttcgccgtcttc

SEQ ID NO: 88 - DNA, 112 bp, synthetic construct
  misc_feature 1..112: note = Description of Artificial Sequence: Synthetic polynucleotide
  source 1..112: mol_type = other DNA
gcctgtttctgccatgtaaggctcgagccttacatggcagaaacaggcttttttgaattcgcaccagcacgctacgcatgacgttgacgttgaccatggtttcgccgtcttc

SEQ ID NO: 89 - DNA, 112 bp, synthetic construct
  misc_feature 1..112: note = Description of Artificial Sequence: Synthetic polynucleotide
  source 1..112: mol_type = other DNA
gacaggaaaggtaattattatctcgagataataattacctttcctgtcttttttgaattcgcaccagcacgctacgcaactggttgacgttgaccatgcattcgccgtcttc

SEQ ID NO: 90 - DNA, 112 bp, synthetic construct
  misc_feature 1..112: note = Description of Artificial Sequence: Synthetic polynucleotide
  source 1..112: mol_type = other DNA
agctgttcctaaagagaaagactcgagtctttctctttaggaacagctttttttgaattcgcaccagcacgctacgcacacagttgacgttgaccatgacttcgccgtcttc

SEQ ID NO: 91 - DNA, 112 bp, synthetic construct
  misc_feature 1..112: note = Description of Artificial Sequence: Synthetic polynucleotide
  source 1..112: mol_type = other DNA
cgagtcaaacctttatttatactcgagtataaataaaggtttgactcgttttttgaattcgcaccagcacgctacgcagtgtgttgacgttgaccatgtgttcgccgtcttc

SEQ ID NO: 92 - DNA, 112 bp, synthetic construct
  misc_feature 1..112: note = Description of Artificial Sequence: Synthetic polynucleotide
  source 1..112: mol_type = other DNA
ggctactctccaacaattagactcgagtctaattgttggagagtagccttttttgaattcgcaccagcacgctacgcagtacgttgacgttgacacgtgtttcgccgtcttc

SEQ ID NO: 93 - DNA, 112 bp, synthetic construct
  misc_feature 1..112: note = Description of Artificial Sequence: Synthetic polynucleotide
  source 1..112: mol_type = other DNA
gcagctcgacagttacaaagtctcgagactttgtaactgtcgagctgcttttttgaattcgcaccagcacgctacgcatgtggttgacgttgacacgtcattcgccgtcttc

SEQ ID NO: 94 - DNA, 112 bp, synthetic construct
  misc_feature 1..112: note = Description of Artificial Sequence: Synthetic polynucleotide
  source 1..112: mol_type = other DNA
cagaaggcctagacattaaacctcgaggtttaatgtctaggccttctgttttttgaattcgcaccagcacgctacgcaaccagttgacgttgacacgtacttcgccgtcttc

SEQ ID NO: 95 - DNA, 112 bp, synthetic construct
  misc_feature 1..112: note = Description of Artificial Sequence: Synthetic polynucleotide
  source 1..112: mol_type = other DNA
agatgagtattattcagaagactcgagtcttctgaataatactcatctttttttgaattcgcaccagcacgctacgcacagtgttgacgttgacacgttgttcgccgtcttc

SEQ ID NO: 96 - DNA, 112 bp, synthetic construct
  misc_feature 1..112: note = Description of Artificial Sequence: Synthetic polynucleotide
  source 1..112: mol_type = other DNA
caattagaagcaccttataacctcgaggttataaggtgcttctaattgttttttgaattcgcaccagcacgctacgcatgtggttgacgttgacaccagtttcgccgtcttc

SEQ ID NO: 97 - DNA, 112 bp, synthetic construct
  misc_feature 1..112: note = Description of Artificial Sequence: Synthetic polynucleotide
  source 1..112: mol_type = other DNA
ggaacttgtccattagtttggctcgagccaaactaatggacaagttccttttttgaattcgcaccagcacgctacgcaacgtgttgacgttgacaccacattcgccgtcttc

SEQ ID NO: 98 - DNA, 112 bp, synthetic construct
  misc_feature 1..112: note = Description of Artificial Sequence: Synthetic polynucleotide
  source 1..112: mol_type = other DNA
gcaccttataacagtgatactctcgagagtatcactgttataaggtgcttttttgaattcgcaccagcacgctacgcacaacgttgacgttgacaccaacttcgccgtcttc

SEQ ID NO: 99 - DNA, 112 bp, synthetic construct
  misc_feature 1..112: note = Description of Artificial Sequence: Synthetic polynucleotide
  source 1..112: mol_type = other DNA
ggcatctataagaggataaaactcgagttttatcctcttatagatgccttttttgaattcgcaccagcacgctacgcagtcagttgacgttgacaccatgttcgccgtcttc

SEQ ID NO: 100 - DNA, 112 bp, synthetic construct
  misc_feature 1..112: note = Description of Artificial Sequence: Synthetic polynucleotide
  source 1..112: mol_type = other DNA
cattggaagttgtcattcagtctcgagactgaatgacaacttccaatgttttttgaattcgcaccagcacgctacgcaacgtgttgacgttgacacacgtttcgccgtcttc

SEQ ID NO: 101 - DNA, 112 bp, synthetic construct
  misc_feature 1..112: note = Description of Artificial Sequence: Synthetic polynucleotide
  source 1..112: mol_type = other DNA
tggaaatgactatgatttaatctcgagattaaatcatagtcatttccattttttgaattcgcaccagcacgctacgcacacagttgacgttgacacaccattcgccgtcttc

SEQ ID NO: 102 - DNA, 130 bp, synthetic construct
  misc_feature 1..130: note = Description of Artificial Sequence: Synthetic polynucleotide
  source 1..130: mol_type = other DNA
gaagacgcaccggcggttgctagaagttacatttgttaatattcatagcagatgtagcttctagcaaccgttttttgaattcgcaccagcacgctacgcaacgtgtcacagtacactgcaacttcgccgt

SEQ ID NO: 103 - DNA, 130 bp, synthetic construct
  misc_feature 1..130: note = Description of Artificial Sequence: Synthetic polynucleotide
  source 1..130: mol_type = other DNA
gaagacgcaccgggccacatttcgtaaaggaaatgttaatattcatagcgtttcctttgcgaaatgtggcttttttgaattcgcaccagcacgctacgcatgacgtcacagtacactgcacattcgccgt

SEQ ID NO: 104 - DNA, 130 bp, synthetic construct
  misc_feature 1..130: note = Description of Artificial Sequence: Synthetic polynucleotide
  source 1..130: mol_type = other DNA
gaagacgcaccggcctcatgactggatgatttctgttaatattcatagcagaagtcatccggtcatgaggttttttgaattcgcaccagcacgctacgcagtcagtcacagtacactgcagtttcgccgt

SEQ ID NO: 105 - DNA, 130 bp, synthetic construct
  misc_feature 1..130: note = Description of Artificial Sequence: Synthetic polynucleotide
  source 1..130: mol_type = other DNA
gaagacgcaccggcgagttgccatatttcgtaaagttaatattcatagctttgcgaaatgtggcaactcgttttttgaattcgcaccagcacgctacgcaacacgtcacagtacactggttgttcgccgt

SEQ ID NO: 106 - DNA, 130 bp, synthetic construct
  misc_feature 1..130: note = Description of Artificial Sequence: Synthetic polynucleotide
  source 1..130: mol_type = other DNA
gaagacgcaccggcgtcatggtcttatcaatttcgttaatattcatagcgaagttgataagaccatgacgttttttgaattcgcaccagcacgctacgcatgtggtcacagtacactggtacttcgccgt

SEQ ID NO: 107 - DNA, 130 bp, synthetic construct
  misc_feature 1..130: note = Description of Artificial Sequence: Synthetic polynucleotide
  source 1..130: mol_type = other DNA
gaagacgcaccgggagcgttatggtcttattaacgttaatattcatagcgttgataagaccatgacgctcttttttgaattcgcaccagcacgctacgcagtcagtcacagtacactggtcattcgccgt

SEQ ID NO: 108 - DNA, 130 bp, synthetic construct
  misc_feature 1..130: note = Description of Artificial Sequence: Synthetic polynucleotide
  source 1..130: mol_type = other DNA
gaagacgcaccggccggatgacttcttaagaagtgttaatattcatagcgcttcttgagaagtcatccggttttttgaattcgcaccagcacgctacgcacagtgtcacagtacactggtgtttcgccgt

SEQ ID NO: 109 - DNA, 130 bp, synthetic construct
  misc_feature 1..130: note = Description of Artificial Sequence: Synthetic polynucleotide
  source 1..130: mol_type = other DNA
gaagacgcaccggcacagggaggaatttgtctatgttaatattcatagcatggacaagttcctccctgtgttttttgaattcgcaccagcacgctacgcagtacgtcacagtacacactgtgttcgccgt

SEQ ID NO: 110 - DNA, 130 bp, synthetic construct
  misc_feature 1..130: note = Description of Artificial Sequence: Synthetic polynucleotide
  source 1..130: mol_type = other DNA
gaagacgcaccgggccttctttgaatgacttagagttaatattcatagctctaggtcattcaaaggaggcttttttgaattcgcaccagcacgctacgcacatggtcacagtacacactgacttcgccgt

SEQ ID NO: 111 - DNA, 130 bp, synthetic construct
  misc_feature 1..130: note = Description of Artificial Sequence: Synthetic polynucleotide
  source 1..130: mol_type = other DNA
gaagacgcaccggcctatggttgtggtcagtaaagttaatattcatagctttgctgaccacagccataggttttttgaattcgcaccagcacgctacgcaaccagtcacagtacacactgcattcgccgt

SEQ ID NO: 112 - DNA, 130 bp, synthetic construct
  misc_feature 1..130: note = Description of Artificial Sequence: Synthetic polynucleotide
  source 1..130: mol_type = other DNA
gaagacgcaccgggagcttgtgttctttgaatgagttaatattcatagctcattcaaaggaggcaagctcttttttgaattcgcaccagcacgctacgcatggtgtcacagtacacactggtttcgccgt

SEQ ID NO: 113 - DNA, 130 bp, synthetic construct
  misc_feature 1..130: note = Description of Artificial Sequence: Synthetic polynucleotide
  source 1..130: mol_type = other DNA
gaagacgcaccggcaggtcttggaggggatcttagttaatattcatagctaggattccctccaagacctgttttttgaattcgcaccagcacgctacgcacacagtcacagtacacacactgttcgccgt

SEQ ID NO: 114 - DNA, 130 bp, synthetic construct
  misc_feature 1..130: note = Description of Artificial Sequence: Synthetic polynucleotide
  source 1..130: mol_type = other DNA
gaagacgcaccggcagtacttcagcctaaagaaagttaatattcatagctttctttgggctgaggtactgttttttgaattcgcaccagcacgctacgcaacacgtcacagtacacacacacttcgccgt

SEQ ID NO: 115 - DNA, 130 bp, synthetic construct
  misc_feature 1..130: note = Description of Artificial Sequence: Synthetic polynucleotide
  source 1..130: mol_type = other DNA
gaagacgcaccggctggctattcttaaagggattgttaatattcatagcaatccctttgagaatggccagttttttgaattcgcaccagcacgctacgcatggtgtcacagtacacacaccattcgccgt

SEQ ID NO: 116 - DNA, 130 bp, synthetic construct
  misc_feature 1..130: note = Description of Artificial Sequence: Synthetic polynucleotide
  source 1..130: mol_type = other DNA
gaagacgcaccgggccatggtggtaataggtcttgttaatattcatagcaagacctgttaccaccatggcttttttgaattcgcaccagcacgctacgcagttggtcacagtacacacacgtttcgccgt

SEQ ID NO: 117 - DNA, 130 bp, synthetic construct
  misc_feature 1..130: note = Description of Artificial Sequence: Synthetic polynucleotide
  source 1..130: mol_type = other DNA
gaagacgcaccggcaggagaagctgttggtattagttaatattcatagctgataccagcagcttctcctgttttttgaattcgcaccagcacgctacgcaacgtgtcacagtacacaccatgttcgccgt

SEQ ID NO: 118 - DNA, 130 bp, synthetic construct
  misc_feature 1..130: note = Description of Artificial Sequence: Synthetic polynucleotide
  source 1..130: mol_type = other DNA
gaagacgcaccggccacgagtcaaatctttatttgttaatattcatagcaaataaaggtttgactcgtggttttttgaattcgcaccagcacgctacgcacacagtgttgtggtcacaacgtttcgccgt

SEQ ID NO: 119 - DNA, 130 bp, synthetic construct
  misc_feature 1..130: note = Description of Artificial Sequence: Synthetic polynucleotide
  source 1..130: mol_type = other DNA
gaagacgcaccgggctacatcttaccttagttatgttaatattcatagcatgactaaggtaagatgtagcttttttgaattcgcaccagcacgctacgcatgacgtgttgtggtcacacatgttcgccgt

SEQ ID NO: 120 - DNA, 112 bp, synthetic construct
  misc_feature 1..112: note = Description of Artificial Sequence: Synthetic polynucleotide
  source 1..112: mol_type = other DNA
ccggatgacttctcaagaagcctcgaggcttcttgagaagtcatccggttttttgaattcgcaccagcacgctacgcagttggttgacgttgacacacacttcgccgtcttc

SEQ ID NO: 121 - DNA, 130 bp, synthetic construct
  misc_feature 1..130: note = Description of Artificial Sequence: Synthetic polynucleotide
  source 1..130: mol_type = other DNA
gaagacgcaccgggctccaatattgttggcattagttaatattcatagctagtgccaacagtattggagcttttttgaattcgcaccagcacgctacgcacacagtgttgtggtcacacacattcgccgt

SEQ ID NO: 122 - DNA, 130 bp, synthetic construct
  misc_feature 1..130: note = Description of Artificial Sequence: Synthetic polynucleotide
  source 1..130: mol_type = other DNA
gaagacgcaccggccaacaattagaagcatcttagttaatattcatagctaaggtgcttctaattgttggttttttgaattcgcaccagcacgctacgcagttggtgttgtggtcacacaacttcgccgt

SEQ ID NO: 123 - DNA, 56 bp, synthetic construct
  misc_feature 1..56: note = Description of Artificial Sequence: Synthetic oligonucleotide
  source 1..56: mol_type = other DNA
gccggcagctagcgacgccatctcgagatggcgtcgctagctgccggcttttttga

SEQ ID NO: 124 - DNA, 56 bp, synthetic construct
  misc_feature 1..56: note = Description of Artificial Sequence: Synthetic oligonucleotide
  source 1..56: mol_type = other DNA
cctaaggttaagtcgccctcgctcgagcgagggcgacttaaccttaggttttttga

SEQ ID NO: 125 - DNA, 65 bp, synthetic construct
  misc_feature 1..65: note = Description of Artificial Sequence: Synthetic oligonucleotide
  source 1..65: mol_type = other DNA
cggttgctagaagctacatctgttaatattcatagcagatgtagcttctagcaaccgttttttga

SEQ ID NO: 126 - DNA, 65 bp, synthetic construct
  misc_feature 1..65: note = Description of Artificial Sequence: Synthetic oligonucleotide
  source 1..65: mol_type = other DNA
cggttgctagaagttacatttgttaatattcatagcagatgtagcttctagcaaccgttttttga

SEQ ID NO: 127 - DNA, 56 bp, synthetic construct
  misc_feature 1..56: note = Description of Artificial Sequence: Synthetic oligonucleotide
  source 1..56: mol_type = other DNA
cagaaggcctagacattaaacctcgaggtttaatgtctaggccttctgttttttga

SEQ ID NO: 128 - DNA, 65 bp, synthetic construct
  misc_feature 1..65: note = Description of Artificial Sequence: Synthetic oligonucleotide
  source 1..65: mol_type = other DNA
gccacatttcgcaaaggaaacgttaatattcatagcgtttcctttgcgaaatgtggcttttttga

SEQ ID NO: 129 - DNA, 65 bp, synthetic construct
  misc_feature 1..65: note = Description of Artificial Sequence: Synthetic oligonucleotide
  source 1..65: mol_type = other DNA
gccacatttcgtaaaggaaatgttaatattcatagcgtttcctttgcgaaatgtggcttttttga

SEQ ID NO: 130 - DNA, 56 bp, synthetic construct
  misc_feature 1..56: note = Description of Artificial Sequence: Synthetic oligonucleotide
  source 1..56: mol_type = other DNA
cggacaagctgttcctaaagactcgagtctttaggaacagcttgtccgttttttga

SEQ ID NO: 131 - DNA, 65 bp, synthetic construct
  misc_feature 1..65: note = Description of Artificial Sequence: Synthetic oligonucleotide
  source 1..65: mol_type = other DNA
cgagttgccacatttcgcaaagttaatattcatagctttgcgaaatgtggcaactcgttttttga

SEQ ID NO: 132 - RNA, 20 nt, synthetic construct
  misc_feature 1..20: note = Description of Artificial Sequence: Synthetic oligonucleotide
  source 1..20: mol_type = other RNA
agtgcgacaggttcgctaca

SEQ ID NO: 133 - RNA, 20 nt, synthetic construct
  misc_feature 1..20: note = Description of Artificial Sequence: Synthetic oligonucleotide
  source 1..20: mol_type = other RNA
tggaatagcagagactccgg

SEQ ID NO: 134 - RNA, 20 nt, synthetic construct
  misc_feature 1..20: note = Description of Artificial Sequence: Synthetic oligonucleotide
  source 1..20: mol_type = other RNA
ctaaataactgtgaactcgg

SEQ ID NO: 135 - RNA, 20 nt, synthetic construct
  misc_feature 1..20: note = Description of Artificial Sequence: Synthetic oligonucleotide
  source 1..20: mol_type = other RNA
tgctattccagtttccatgg

SEQ ID NO: 136 - RNA, 20 nt, synthetic construct
  misc_feature 1..20: note = Description of Artificial Sequence: Synthetic oligonucleotide
  source 1..20: mol_type = other RNA
cagacccaggcacgacagta

SEQ ID NO: 137 - RNA, 20 nt, synthetic construct
  misc_feature 1..20: note = Description of Artificial Sequence: Synthetic oligonucleotide
  source 1..20: mol_type = other RNA
tttctgaaacaggatcgtgt

SEQ ID NO: 138 - RNA, 20 nt, synthetic construct
  misc_feature 1..20: note = Description of Artificial Sequence: Synthetic oligonucleotide
  source 1..20: mol_type = other RNA
tgagaagtcatccggtcatg

SEQ ID NO: 139 - RNA, 20 nt, synthetic construct
  misc_feature 1..20: note = Description of Artificial Sequence: Synthetic oligonucleotide
  source 1..20: mol_type = other RNA
gaattgcagaccagtttttg

SEQ ID NO: 140 - RNA, 20 nt, synthetic construct
  misc_feature 1..20: note = Description of Artificial Sequence: Synthetic oligonucleotide
  source 1..20: mol_type = other RNA
cgagttgccacatttcgcaa

SEQ ID NO: 141 - RNA, 20 nt, synthetic construct
  misc_feature 1..20: note = Description of Artificial Sequence: Synthetic oligonucleotide
  source 1..20: mol_type = other RNA
ctgaaacaggatcgtgtggg

SEQ ID NO: 142 - RNA, 20 nt, synthetic construct
  misc_feature 1..20: note = Description of Artificial Sequence: Synthetic oligonucleotide
  source 1..20: mol_type = other RNA
ggcggcccgagatgttatct

SEQ ID NO: 143 - RNA, 20 nt, synthetic construct
  misc_feature 1..20: note = Description of Artificial Sequence: Synthetic oligonucleotide
  source 1..20: mol_type = other RNA
tgtataccacaccttgcata

SEQ ID NO: 144 - RNA, 20 nt, synthetic construct
  misc_feature 1..20: note = Description of Artificial Sequence: Synthetic oligonucleotide
  source 1..20: mol_type = other RNA
atgtataccacaccttgcat

SEQ ID NO: 145 - RNA, 20 nt, synthetic construct
  misc_feature 1..20: note = Description of Artificial Sequence: Synthetic oligonucleotide
  source 1..20: mol_type = other RNA
tcttagtgaaaagcaaacac

SEQ ID NO: 146 - RNA, 20 nt, synthetic construct
  misc_feature 1..20: note = Description of Artificial Sequence: Synthetic oligonucleotide
  source 1..20: mol_type = other RNA
gggatttggcaaccttaaca

SEQ ID NO: 147 - RNA, 20 nt, synthetic construct
  misc_feature 1..20: note = Description of Artificial Sequence: Synthetic oligonucleotide
  source 1..20: mol_type = other RNA
ttgtgccacctctccctgag

SEQ ID NO: 148 - RNA, 20 nt, synthetic construct
  misc_feature 1..20: note = Description of Artificial Sequence: Synthetic oligonucleotide
  source 1..20: mol_type = other RNA
accaagacctgttaccacca

SEQ ID NO: 149 - RNA, 20 nt, synthetic construct
  misc_feature 1..20: note = Description of Artificial Sequence: Synthetic oligonucleotide
  source 1..20: mol_type = other RNA
tcggcagtaatatctctggg

SEQ ID NO: 150 - RNA, 20 nt, synthetic construct
  misc_feature 1..20: note = Description of Artificial Sequence: Synthetic oligonucleotide
  source 1..20: mol_type = other RNA
ggatctgaccgccctatgca

SEQ ID NO: 151 - RNA, 20 nt, synthetic construct
  misc_feature 1..20: note = Description of Artificial Sequence: Synthetic oligonucleotide
  source 1..20: mol_type = other RNA
cgtcatggtcttatcaactt

SEQ ID NO: 152 - RNA, 20 nt, synthetic construct
  misc_feature 1..20: note = Description of Artificial Sequence: Synthetic oligonucleotide
  source 1..20: mol_type = other RNA
ttcaagacgacagttctgga

SEQ ID NO: 153 - RNA, 20 nt, synthetic construct
  misc_feature 1..20: note = Description of Artificial Sequence: Synthetic oligonucleotide
  source 1..20: mol_type = other RNA
tgaagtctagttgatgacta

SEQ ID NO: 154 - RNA, 20 nt, synthetic construct
  misc_feature 1..20: note = Description of Artificial Sequence: Synthetic oligonucleotide
  source 1..20: mol_type = other RNA
cacagttatttagagcgtca

SEQ ID NO: 155 - RNA, 20 nt, synthetic construct
  misc_feature 1..20: note = Description of Artificial Sequence: Synthetic oligonucleotide
  source 1..20: mol_type = other RNA
tgccaacagtattggagctg

SEQ ID NO: 156 - RNA, 20 nt, synthetic construct
  misc_feature 1..20: note = Description of Artificial Sequence: Synthetic oligonucleotide
  source 1..20: mol_type = other RNA
agtgccaacagtattggagc

SEQ ID NO: 157 - RNA, 20 nt, synthetic construct
  misc_feature 1..20: note = Description of Artificial Sequence: Synthetic oligonucleotide
  source 1..20: mol_type = other RNA
gcatctgtctcacatgcttg

SEQ ID NO: 158 - RNA, 20 nt, synthetic construct
  misc_feature 1..20: note = Description of Artificial Sequence: Synthetic oligonucleotide
  source 1..20: mol_type = other RNA
acatctgcagtccaaaggat

SEQ ID NO: 159 - RNA, 20 nt, synthetic construct
  misc_feature 1..20: note = Description of Artificial Sequence: Synthetic oligonucleotide
  source 1..20: mol_type = other RNA
ggcacaaactgaacggctgg

SEQ ID NO: 160 - RNA, 20 nt, synthetic construct
  misc_feature 1..20: note = Description of Artificial Sequence: Synthetic oligonucleotide
  source 1..20: mol_type = other RNA
ggtaattattataggctctg

SEQ ID NO: 161 - RNA, 20 nt, synthetic construct
  misc_feature 1..20: note = Description of Artificial Sequence: Synthetic oligonucleotide
  source 1..20: mol_type = other RNA
aagatgagcagattgaacat

SEQ ID NO: 162 - RNA, 20 nt, synthetic construct
  misc_feature 1..20: note = Description of Artificial Sequence: Synthetic oligonucleotide
  source 1..20: mol_type = other RNA
tggcagtacgactgccagca

SEQ ID NO: 163 - RNA, 20 nt, synthetic construct
  misc_feature 1..20: note = Description of Artificial Sequence: Synthetic oligonucleotide
  source 1..20: mol_type = other RNA
cgcggaggctctttcttgcg

SEQ ID NO: 164 - RNA, 20 nt, synthetic construct
  misc_feature 1..20: note = Description of Artificial Sequence: Synthetic oligonucleotide
  source 1..20: mol_type = other RNA
ataagtgacgatgtgattgt

SEQ ID NO: 165 - RNA, 20 nt, synthetic construct
  misc_feature 1..20: note = Description of Artificial Sequence: Synthetic oligonucleotide
  source 1..20: mol_type = other RNA
ggcagtacgactgccagcag

SEQ ID NO: 166 - RNA, 20 nt, synthetic construct
  misc_feature 1..20: note = Description of Artificial Sequence: Synthetic oligonucleotide
  source 1..20: mol_type = other RNA
ggaaaacatctgcagtccaa

SEQ ID NO: 167 - RNA, 20 nt, synthetic construct
  misc_feature 1..20: note = Description of Artificial Sequence: Synthetic oligonucleotide
  source 1..20: mol_type = other RNA
tgcccgaacaaattgacact

SEQ ID NO: 168 - RNA, 20 nt, synthetic construct
  misc_feature 1..20: note = Description of Artificial Sequence: Synthetic oligonucleotide
  source 1..20: mol_type = other RNA
actgaatacagcagtgcgac

SEQ ID NO: 169 - RNA, 20 nt, synthetic construct
  misc_feature 1..20: note = Description of Artificial Sequence: Synthetic oligonucleotide
  source 1..20: mol_type = other RNA
ctggcagccacctgacagta

SEQ ID NO: 170 - RNA, 20 nt, synthetic construct
  misc_feature 1..20: note = Description of Artificial Sequence: Synthetic oligonucleotide
  source 1..20: mol_type = other RNA
gcagacccaggcacgacagt

SEQ ID NO: 171 - RNA, 20 nt, synthetic construct
  misc_feature 1..20: note = Description of Artificial Sequence: Synthetic oligonucleotide
  source 1..20: mol_type = other RNA
tttgcttttcactaagaact

SEQ ID NO: 172 - RNA, 20 nt, synthetic construct
  misc_feature 1..20: note = Description of Artificial Sequence: Synthetic oligonucleotide
  source 1..20: mol_type = other RNA
gggacacaggcttattattg

SEQ ID NO: 173 - RNA, 20 nt, synthetic construct
  misc_feature 1..20: note = Description of Artificial Sequence: Synthetic oligonucleotide
  source 1..20: mol_type = other RNA
tggctactcgtgtgtgcctg

SEQ ID NO: 174 - RNA, 20 nt, synthetic construct
  misc_feature 1..20: note = Description of Artificial Sequence: Synthetic oligonucleotide
  source 1..20: mol_type = other RNA
tctcccgcaaagaagagtcg

SEQ ID NO: 175 - RNA, 20 nt, synthetic construct
  misc_feature 1..20: note = Description of Artificial Sequence: Synthetic oligonucleotide
  source 1..20: mol_type = other RNA
aacatctgcagtccaaagga

SEQ ID NO: 176 - RNA, 20 nt, synthetic construct
  misc_feature 1..20: note = Description of Artificial Sequence: Synthetic oligonucleotide
  source 1..20: mol_type = other RNA
cttagtgaaaagcaaacaca

SEQ ID NO: 177 - RNA, 20 nt, synthetic construct
  misc_feature 1..20: note = Description of Artificial Sequence: Synthetic oligonucleotide
  source 1..20: mol_type = other RNA
cccaggcacgacagtagggc

SEQ ID NO: 178 - RNA, 20 nt, synthetic construct
  misc_feature 1..20: note = Description of Artificial Sequence: Synthetic oligonucleotide
  source 1..20: mol_type = other RNA
gtcaatttgttcgggcatgt

SEQ ID NO: 179 - RNA, 20 nt, synthetic construct
  misc_feature 1..20: note = Description of Artificial Sequence: Synthetic oligonucleotide
  source 1..20: mol_type = other RNA
gaataagagccccgagccca

SEQ ID NO: 180 - RNA, 20 nt, synthetic construct
  misc_feature 1..20: note = Description of Artificial Sequence: Synthetic oligonucleotide
  source 1..20: mol_type = other RNA
ctgctattccagtttccatg

SEQ ID NO: 181 - RNA, 20 nt, synthetic construct
  misc_feature 1..20: note = Description of Artificial Sequence: Synthetic oligonucleotide
  source 1..20: mol_type = other RNA
gagaggtggcacaaactgaa

SEQ ID NO: 182 - RNA, 20 nt, synthetic construct
  misc_feature 1..20: note = Description of Artificial Sequence: Synthetic oligonucleotide
  source 1..20: mol_type = other RNA
aagtgagcctgaagaaccat

SEQ ID NO: 183 - RNA, 20 nt, synthetic construct
  misc_feature 1..20: note = Description of Artificial Sequence: Synthetic oligonucleotide
  source 1..20: mol_type = other RNA
tttgctttcttcgttaggtg

SEQ ID NO: 184 - RNA, 20 nt, synthetic construct
  misc_feature 1..20: note = Description of Artificial Sequence: Synthetic oligonucleotide
  source 1..20: mol_type = other RNA
atttctgaaacaggatcgtg

SEQ ID NO: 185 - RNA, 20 nt, synthetic construct
  misc_feature 1..20: note = Description of Artificial Sequence: Synthetic oligonucleotide
  source 1..20: mol_type = other RNA
acgacagtagggccggcctg

SEQ ID NO: 186 - RNA, 20 nt, synthetic construct
  misc_feature 1..20: note = Description of Artificial Sequence: Synthetic oligonucleotide
  source 1..20: mol_type = other RNA
gtccgttggcttcataaagt

SEQ ID NO: 187 - RNA, 20 nt, synthetic construct
  misc_feature 1..20: note = Description of Artificial Sequence: Synthetic oligonucleotide
  source 1..20: mol_type = other RNA
ataccacaccttgcataggg

SEQ ID NO: 188 - RNA, 20 nt, synthetic construct
  misc_feature 1..20: note = Description of Artificial Sequence: Synthetic oligonucleotide
  source 1..20: mol_type = other RNA
gctctaaataactgtgaact

SEQ ID NO: 189 - RNA, 20 nt, synthetic construct
  misc_feature 1..20: note = Description of Artificial Sequence: Synthetic oligonucleotide
  source 1..20: mol_type = other RNA
aggagggaatcctatggctg

SEQ ID NO: 190 - RNA, 20 nt, synthetic construct
  misc_feature 1..20: note = Description of Artificial Sequence: Synthetic oligonucleotide
  source 1..20: mol_type = other RNA
ataaataaaggtttgactcg

SEQ ID NO: 191 - RNA, 20 nt, synthetic construct
  misc_feature 1..20: note = Description of Artificial Sequence: Synthetic oligonucleotide
  source 1..20: mol_type = other RNA
agctgatcttggagccatgg

SEQ ID NO: 192 - RNA, 20 nt, synthetic construct
  misc_feature 1..20: note = Description of Artificial Sequence: Synthetic oligonucleotide
  source 1..20: mol_type = other RNA
taaaggtttgactcgtggag

SEQ ID NO: 193 - RNA, 20 nt, synthetic construct
  misc_feature 1..20: note = Description of Artificial Sequence: Synthetic oligonucleotide
  source 1..20: mol_type = other RNA
tggaccacaacagacccaga

SEQ ID NO: 194 - RNA, 20 nt, synthetic construct
  misc_feature 1..20: note = Description of Artificial Sequence: Synthetic oligonucleotide
  source 1..20: mol_type = other RNA
gatgaattagctgaaacaca

SEQ ID NO: 195 - RNA, 20 nt, synthetic construct
  misc_feature 1..20: note = Description of Artificial Sequence: Synthetic oligonucleotide
  source 1..20: mol_type = other RNA
agtagccattccttactgtc

SEQ ID NO: 196 - RNA, 20 nt, synthetic construct
  misc_feature 1..20: note = Description of Artificial Sequence: Synthetic oligonucleotide
  source 1..20: mol_type = other RNA
ctggcgaggcagcgtataca

SEQ ID NO: 197 - RNA, 20 nt, synthetic construct
  misc_feature 1..20: note = Description of Artificial Sequence: Synthetic oligonucleotide
  source 1..20: mol_type = other RNA
gttttccactcagggagagg

SEQ ID NO: 198 - RNA, 20 nt, synthetic construct
  misc_feature 1..20: note = Description of Artificial Sequence: Synthetic oligonucleotide
  source 1..20: mol_type = other RNA
cggaaccgccggggtccgca

SEQ ID NO: 199 - RNA, 20 nt, synthetic construct
  misc_feature 1..20: note = Description of Artificial Sequence: Synthetic oligonucleotide
  source 1..20: mol_type = other RNA
agtgagcctgaagaaccatc

SEQ ID NO: 200 - RNA, 20 nt, synthetic construct
  misc_feature 1..20: note = Description of Artificial Sequence: Synthetic oligonucleotide
  source 1..20: mol_type = other RNA
tcaacttcggcatctataag

SEQ ID NO: 201 - RNA, 20 nt, synthetic construct
  misc_feature 1..20: note = Description of Artificial Sequence: Synthetic oligonucleotide
  source 1..20: mol_type = other RNA
gtggggcacctggaatcgag

SEQ ID NO: 202 - RNA, 20 nt, synthetic construct
  misc_feature 1..20: note = Description of Artificial Sequence: Synthetic oligonucleotide
  source 1..20: mol_type = other RNA
ggaatagcagagactccgga

SEQ ID NO: 203 - RNA, 20 nt, synthetic construct
  misc_feature 1..20: note = Description of Artificial Sequence: Synthetic oligonucleotide
  source 1..20: mol_type = other RNA
agccacctgacagtaaggaa

SEQ ID NO: 204 - RNA, 20 nt, synthetic construct
  misc_feature 1..20: note = Description of Artificial Sequence: Synthetic oligonucleotide
  source 1..20: mol_type = other RNA
atagtttcctttgcgaaatg

SEQ ID NO: 205 - RNA, 20 nt, synthetic construct
  misc_feature 1..20: note = Description of Artificial Sequence: Synthetic oligonucleotide
  source 1..20: mol_type = other RNA
agttggaagcgaatccccca

SEQ ID NO: 206 - RNA, 20 nt, synthetic construct
  misc_feature 1..20: note = Description of Artificial Sequence: Synthetic oligonucleotide
  source 1..20: mol_type = other RNA
atggctcagccaatcactcc

SEQ ID NO: 207 - RNA, 20 nt, synthetic construct
  misc_feature 1..20: note = Description of Artificial Sequence: Synthetic oligonucleotide
  source 1..20: mol_type = other RNA
agcggcagcaaccgggacgg

SEQ ID NO: 208 - RNA, 20 nt, synthetic construct
  misc_feature 1..20: note = Description of Artificial Sequence: Synthetic oligonucleotide
  source 1..20: mol_type = other RNA
cttttagcccaaagaaactg

SEQ ID NO: 209 - RNA, 20 nt, synthetic construct
  misc_feature 1..20: note = Description of Artificial Sequence: Synthetic oligonucleotide
  source 1..20: mol_type = other RNA
aagatgtagcttctagcaac

SEQ ID NO: 210 - RNA, 20 nt, synthetic construct
  misc_feature 1..20: note = Description of Artificial Sequence: Synthetic oligonucleotide
  source 1..20: mol_type = other RNA
aataatactcatcttctgag

SEQ ID NO: 211 - RNA, 20 nt, synthetic construct
  misc_feature 1..20: note = Description of Artificial Sequence: Synthetic oligonucleotide
  source 1..20: mol_type = other RNA
ccggccctactgtcgtgcct

SEQ ID NO: 212 - RNA, 20 nt, synthetic construct
  misc_feature 1..20: note = Description of Artificial Sequence: Synthetic oligonucleotide
  source 1..20: mol_type = other RNA
ctgcttcttgagaagtcatc

SEQ ID NO: 213 - RNA, 20 nt, synthetic construct
  misc_feature 1..20: note = Description of Artificial Sequence: Synthetic oligonucleotide
  source 1..20: mol_type = other RNA
agagccgacttcctcatgac

SEQ ID NO: 214 - RNA, 20 nt, synthetic construct
  misc_feature 1..20: note = Description of Artificial Sequence: Synthetic oligonucleotide
  source 1..20: mol_type = other RNA
aggccttctgctaaagccac

SEQ ID NO: 215 - RNA, 20 nt, synthetic construct
  misc_feature 1..20: note = Description of Artificial Sequence: Synthetic oligonucleotide
  source 1..20: mol_type = other RNA
gaatgacaacttccaatgcc

SEQ ID NO: 216 - RNA, 20 nt, synthetic construct
  misc_feature 1..20: note = Description of Artificial Sequence: Synthetic oligonucleotide
  source 1..20: mol_type = other RNA
tggttaaaaggacactgtca

SEQ ID NO: 217 - RNA, 20 nt, synthetic construct
  misc_feature 1..20: note = Description of Artificial Sequence: Synthetic oligonucleotide
  source 1..20: mol_type = other RNA
tgctgcttcagcacacccag

SEQ ID NO: 218 - RNA, 20 nt, synthetic construct
  misc_feature 1..20: note = Description of Artificial Sequence: Synthetic oligonucleotide
  source 1..20: mol_type = other RNA
ccgcaagaaagagcctccgc

SEQ ID NO: 219 - RNA, 20 nt, synthetic construct
  misc_feature 1..20: note = Description of Artificial Sequence: Synthetic oligonucleotide
  source 1..20: mol_type = other RNA
aacttccaatgcctggccaa

SEQ ID NO: 220 - RNA, 20 nt, synthetic construct
  misc_feature 1..20: note = Description of Artificial Sequence: Synthetic oligonucleotide
  source 1..20: mol_type = other RNA
aaaggtttgactcgtggagc

SEQ ID NO: 221 - RNA, 20 nt, synthetic construct
  misc_feature 1..20: note = Description of Artificial Sequence: Synthetic oligonucleotide
  source 1..20: mol_type = other RNA
gtgccaacagtattggagct

SEQ ID NO: 222 - RNA, 20 nt, synthetic construct
  misc_feature 1..20: note = Description of Artificial Sequence: Synthetic oligonucleotide
  source 1..20: mol_type = other RNA
tcatccggtcatgaggaagt

SEQ ID NO: 223 - RNA, 20 nt, synthetic construct
  misc_feature 1..20: note = Description of Artificial Sequence: Synthetic oligonucleotide
  source 1..20: mol_type = other RNA
gccactagtgccaacagtat

SEQ ID NO: 224 - RNA, 20 nt, synthetic construct
  misc_feature 1..20: note = Description of Artificial Sequence: Synthetic oligonucleotide
  source 1..20: mol_type = other RNA
tagggcaagctaccttgtta

SEQ ID NO: 225 - RNA, 20 nt, synthetic construct
  misc_feature 1..20: note = Description of Artificial Sequence: Synthetic oligonucleotide
  source 1..20: mol_type = other RNA
gatgcctggccattctcaaa

SEQ ID NO: 226 - RNA, 20 nt, synthetic construct
  misc_feature 1..20: note = Description of Artificial Sequence: Synthetic oligonucleotide
  source 1..20: mol_type = other RNA
caactctctcccttaagcac

SEQ ID NO: 227 - RNA, 20 nt, synthetic construct
  misc_feature 1..20: note = Description of Artificial Sequence: Synthetic oligonucleotide
  source 1..20: mol_type = other RNA
tgttttccagatattatcag

SEQ ID NO: 228 - RNA, 20 nt, synthetic construct
  misc_feature 1..20: note = Description of Artificial Sequence: Synthetic oligonucleotide
  source 1..20: mol_type = other RNA
cttcaagacgacagttctgg

SEQ ID NO: 229 - RNA, 20 nt, synthetic construct
  misc_feature 1..20: note = Description of Artificial Sequence: Synthetic oligonucleotide
  source 1..20: mol_type = other RNA
gattccacgactcttctttg

SEQ ID NO: 230 - RNA, 20 nt, synthetic construct
  misc_feature 1..20: note = Description of Artificial Sequence: Synthetic oligonucleotide
  source 1..20: mol_type = other RNA
atgcatctgtctcacatgct

SEQ ID NO: 231 - RNA, 20 nt, synthetic construct
  misc_feature 1..20: note = Description of Artificial Sequence: Synthetic oligonucleotide
  source 1..20: mol_type = other RNA
aactctctcccttaagcact

SEQ ID NO: 232 - RNA, 20 nt, synthetic construct
  misc_feature 1..20: note = Description of Artificial Sequence: Synthetic oligonucleotide
  source 1..20: mol_type = other RNA
tcgacttacagcttgtccgt

SEQ ID NO: 233 - RNA, 20 nt, synthetic construct
  misc_feature 1..20: note = Description of Artificial Sequence: Synthetic oligonucleotide
  source 1..20: mol_type = other RNA
tggtagcagtgcagtacctc

SEQ ID NO: 234 - RNA, 20 nt, synthetic construct
  misc_feature 1..20: note = Description of Artificial Sequence: Synthetic oligonucleotide
  source 1..20: mol_type = other RNA
aggaggtccttacttggtag

SEQ ID NO: 235 - RNA, 20 nt, synthetic construct
  misc_feature 1..20: note = Description of Artificial Sequence: Synthetic oligonucleotide
  source 1..20: mol_type = other RNA
ataggtagagtacagagaga

SEQ ID NO: 236 - RNA, 20 nt, synthetic construct
  misc_feature 1..20: note = Description of Artificial Sequence: Synthetic oligonucleotide
  source 1..20: mol_type = other RNA
gcactgtggctgggtagtta

SEQ ID NO: 237 - RNA, 20 nt, synthetic construct
  misc_feature 1..20: note = Description of Artificial Sequence: Synthetic oligonucleotide
  source 1..20: mol_type = other RNA
ttttctaggagggaatccta

SEQ ID NO: 238 - RNA, 20 nt, synthetic construct
  misc_feature 1..20: note = Description of Artificial Sequence: Synthetic oligonucleotide
  source 1..20: mol_type = other RNA
cggaccccggcggttccgcc

SEQ ID NO: 239 - RNA, 20 nt, synthetic construct
  misc_feature 1..20: note = Description of Artificial Sequence: Synthetic oligonucleotide
  source 1..20: mol_type = other RNA
tgcccactttatgaagccaa

SEQ ID NO: 240 - RNA, 20 nt, synthetic construct
  misc_feature 1..20: note = Description of Artificial Sequence: Synthetic oligonucleotide
  source 1..20: mol_type = other RNA
gagcaccatgcactgtggct

SEQ ID NO: 241 - RNA, 20 nt, synthetic construct
  misc_feature 1..20: note = Description of Artificial Sequence: Synthetic oligonucleotide
  source 1..20: mol_type = other RNA
gcaaagaagagtcgtggaat

SEQ ID NO: 242 - RNA, 20 nt, synthetic construct
  misc_feature 1..20: note = Description of Artificial Sequence: Synthetic oligonucleotide
  source 1..20: mol_type = other RNA
ctcccttaagcactgggatc

SEQ ID NO: 243 - RNA, 20 nt, synthetic construct
  misc_feature 1..20: note = Description of Artificial Sequence: Synthetic oligonucleotide
  source 1..20: mol_type = other RNA
agatgatcctgcagcaacat

SEQ ID NO: 244 - RNA, 20 nt, synthetic construct
  misc_feature 1..20: note = Description of Artificial Sequence: Synthetic oligonucleotide
  source 1..20: mol_type = other RNA
cccgcggaggctctttcttg

SEQ ID NO: 245 - RNA, 20 nt, synthetic construct
  misc_feature 1..20: note = Description of Artificial Sequence: Synthetic oligonucleotide
  source 1..20: mol_type = other RNA
tctgctattccagtttccat

SEQ ID NO: 246 - RNA, 20 nt, synthetic construct
  misc_feature 1..20: note = Description of Artificial Sequence: Synthetic oligonucleotide
  source 1..20: mol_type = other RNA
tgtggtccactgataatatc

SEQ ID NO: 247 - RNA, 20 nt, synthetic construct
  misc_feature 1..20: note = Description of Artificial Sequence: Synthetic oligonucleotide
  source 1..20: mol_type = other RNA
aattgcagaccagtttttgg

SEQ ID NO: 248 - RNA, 20 nt, synthetic construct
  misc_feature 1..20: note = Description of Artificial Sequence: Synthetic oligonucleotide
  source 1..20: mol_type = other RNA
tttagctaaaaagacaggaa

SEQ ID NO: 249 - RNA, 20 nt, synthetic construct
  misc_feature 1..20: note = Description of Artificial Sequence: Synthetic oligonucleotide
  source 1..20: mol_type = other RNA
acagcaggcggctccgagaa

SEQ ID NO: 250 - RNA, 20 nt, synthetic construct
  misc_feature 1..20: note = Description of Artificial Sequence: Synthetic oligonucleotide
  source 1..20: mol_type = other RNA
atgtcacacttttggaagcc

SEQ ID NO: 251 - RNA, 20 nt, synthetic construct
  misc_feature 1..20: note = Description of Artificial Sequence: Synthetic oligonucleotide
  source 1..20: mol_type = other RNA
ttcttcccagataacatctc

SEQ ID NO: 252 - RNA, 20 nt, synthetic construct
  misc_feature 1..20: note = Description of Artificial Sequence: Synthetic oligonucleotide
  source 1..20: mol_type = other RNA
tcgttggcgtgctgatccct

SEQ ID NO: 253 - RNA, 20 nt, synthetic construct
  misc_feature 1..20: note = Description of Artificial Sequence: Synthetic oligonucleotide
  source 1..20: mol_type = other RNA
gctgagtgggctgcgagaag

SEQ ID NO: 254 - RNA, 20 nt, synthetic construct
  misc_feature 1..20: note = Description of Artificial Sequence: Synthetic oligonucleotide
  source 1..20: mol_type = other RNA
tcggaccagccggcgcaagc

SEQ ID NO: 255 - RNA, 20 nt, synthetic construct
  misc_feature 1..20: note = Description of Artificial Sequence: Synthetic oligonucleotide
  source 1..20: mol_type = other RNA
catgtatacgctgcctcgcc

SEQ ID NO: 256 - RNA, 20 nt, synthetic construct
  misc_feature 1..20: note = Description of Artificial Sequence: Synthetic oligonucleotide
  source 1..20: mol_type = other RNA
ggttccgccaggcccccggg

SEQ ID NO: 257 - RNA, 20 nt, synthetic construct
  misc_feature 1..20: note = Description of Artificial Sequence: Synthetic oligonucleotide
  source 1..20: mol_type = other RNA
tgtgattgttggccgatgcc

SEQ ID NO: 258 - RNA, 20 nt, synthetic construct
  misc_feature 1..20: note = Description of Artificial Sequence: Synthetic oligonucleotide
  source 1..20: mol_type = other RNA
agccattccttactgtcagg

SEQ ID NO: 259 - RNA, 20 nt, synthetic construct
  misc_feature 1..20: note = Description of Artificial Sequence: Synthetic oligonucleotide
  source 1..20: mol_type = other RNA
aataataagcctgtgtccct

SEQ ID NO: 260 - RNA, 20 nt, synthetic construct
  misc_feature 1..20: note = Description of Artificial Sequence: Synthetic oligonucleotide
  source 1..20: mol_type = other RNA
tccaatactgttggcactag

SEQ ID NO: 261 - RNA, 20 nt, synthetic construct
  misc_feature 1..20: note = Description of Artificial Sequence: Synthetic oligonucleotide
  source 1..20: mol_type = other RNA
tccatgggggtcgcagaccc

SEQ ID NO: 262 - RNA, 20 nt, synthetic construct
  misc_feature 1..20: note = Description of Artificial Sequence: Synthetic oligonucleotide
  source 1..20: mol_type = other RNA
ggtggcacaaactgaacggc

SEQ ID NO: 263 - RNA, 20 nt, synthetic construct
  misc_feature 1..20: note = Description of Artificial Sequence: Synthetic oligonucleotide
  source 1..20: mol_type = other RNA
aaatccctttgagaatggcc

SEQ ID NO: 264 - RNA, 20 nt, synthetic construct
  misc_feature 1..20: note = Description of Artificial Sequence: Synthetic oligonucleotide
  source 1..20: mol_type = other RNA
tgtagctgatcttggagcca

SEQ ID NO: 265 - RNA, 20 nt, synthetic construct
  misc_feature 1..20: note = Description of Artificial Sequence: Synthetic oligonucleotide
  source 1..20: mol_type = other RNA
tcttattcctatgttgctgc

SEQ ID NO: 266 - RNA, 20 nt, synthetic construct
  misc_feature 1..20: note = Description of Artificial Sequence: Synthetic oligonucleotide
  source 1..20: mol_type = other RNA
aactggaatagcagagactc

SEQ ID NO: 267 - RNA, 20 nt, synthetic construct
  misc_feature 1..20: note = Description of Artificial Sequence: Synthetic oligonucleotide
  source 1..20: mol_type = other RNA
tgcagcggcagcaaccggga

SEQ ID NO: 268 - RNA, 20 nt, synthetic construct
  misc_feature 1..20: note = Description of Artificial Sequence: Synthetic oligonucleotide
  source 1..20: mol_type = other RNA
tatacatggcccccaaaaac

SEQ ID NO: 269 - RNA, 20 nt, synthetic construct
  misc_feature 1..20: note = Description of Artificial Sequence: Synthetic oligonucleotide
  source 1..20: mol_type = other RNA
aatgcctggccaagggacac

SEQ ID NO: 270 - RNA, 20 nt, synthetic construct
  misc_feature 1..20: note = Description of Artificial Sequence: Synthetic oligonucleotide
  source 1..20: mol_type = other RNA
aagaaactgtggtgtctcgt

SEQ ID NO: 271 - RNA, 20 nt, synthetic construct
  misc_feature 1..20: note = Description of Artificial Sequence: Synthetic oligonucleotide
  source 1..20: mol_type = other RNA
tgaggccctgcggaccccgg

SEQ ID NO: 272 - RNA, 20 nt, synthetic construct
  misc_feature 1..20: note = Description of Artificial Sequence: Synthetic oligonucleotide
  source 1..20: mol_type = other RNA
tttaaatgcagctgcagttg

SEQ ID NO: 273 - RNA, 20 nt, synthetic construct
  misc_feature 1..20: note = Description of Artificial Sequence: Synthetic oligonucleotide
  source 1..20: mol_type = other RNA
gtgttttgatcgggtgttct

SEQ ID NO: 274 - RNA, 20 nt, synthetic construct
  misc_feature 1..20: note = Description of Artificial Sequence: Synthetic oligonucleotide
  source 1..20: mol_type = other RNA
gatgatgactttgagttcac

SEQ ID NO: 275 - RNA, 20 nt, synthetic construct
  misc_feature 1..20: note = Description of Artificial Sequence: Synthetic oligonucleotide
  source 1..20: mol_type = other RNA
aggtaattattataggctct

SEQ ID NO: 276 - RNA, 20 nt, synthetic construct
  misc_feature 1..20: note = Description of Artificial Sequence: Synthetic oligonucleotide
  source 1..20: mol_type = other RNA
ggacttcaagacgacagttc

SEQ ID NO: 277 - RNA, 20 nt, synthetic construct
  misc_feature 1..20: note = Description of Artificial Sequence: Synthetic oligonucleotide
  source 1..20: mol_type = other RNA
ggggcctggcggaaccgccg

SEQ ID NO: 278 - RNA, 20 nt, synthetic construct
  misc_feature 1..20: note = Description of Artificial Sequence: Synthetic oligonucleotide
  source 1..20: mol_type = other RNA
gatgttttccactcagggag

SEQ ID NO: 279 - RNA, 20 nt, synthetic construct
  misc_feature 1..20: note = Description of Artificial Sequence: Synthetic oligonucleotide
  source 1..20: mol_type = other RNA
atccaagtgtcaatttgttc

SEQ ID NO: 280 - RNA, 20 nt, synthetic construct
  misc_feature 1..20: note = Description of Artificial Sequence: Synthetic oligonucleotide
  source 1..20: mol_type = other RNA
aatgcagctgcagttgtggt

SEQ ID NO: 281 - RNA, 20 nt, synthetic construct
  misc_feature 1..20: note = Description of Artificial Sequence: Synthetic oligonucleotide
  source 1..20: mol_type = other RNA
cagcagagcaccatgcactg

SEQ ID NO: 282 - RNA, 20 nt, synthetic construct
  misc_feature 1..20: note = Description of Artificial Sequence: Synthetic oligonucleotide
  source 1..20: mol_type = other RNA
ccttccacagggcaagcagg

SEQ ID NO: 283 - RNA, 20 nt, synthetic construct
  misc_feature 1..20: note = Description of Artificial Sequence: Synthetic oligonucleotide
  source 1..20: mol_type = other RNA
ctgagtgggctgcgagaagc

SEQ ID NO: 284 - RNA, 20 nt, synthetic construct
  misc_feature 1..20: note = Description of Artificial Sequence: Synthetic oligonucleotide
  source 1..20: mol_type = other RNA
ctttatagaggttccagaag

SEQ ID NO: 285 - RNA, 20 nt, synthetic construct
  misc_feature 1..20: note = Description of Artificial Sequence: Synthetic oligonucleotide
  source 1..20: mol_type = other RNA
aactcggcagtaatatctct

SEQ ID NO: 286 - RNA, 20 nt, synthetic construct
  misc_feature 1..20: note = Description of Artificial Sequence: Synthetic oligonucleotide
  source 1..20: mol_type = other RNA
acagttacaaagttttggaa

SEQ ID NO: 287 - RNA, 20 nt, synthetic construct
  misc_feature 1..20: note = Description of Artificial Sequence: Synthetic oligonucleotide
  source 1..20: mol_type = other RNA
caacttccaatgcctggcca

SEQ ID NO: 288 - RNA, 20 nt, synthetic construct
  misc_feature 1..20: note = Description of Artificial Sequence: Synthetic oligonucleotide
  source 1..20: mol_type = other RNA
actgcagatgttttccactc

SEQ ID NO: 289 - RNA, 20 nt, synthetic construct
  misc_feature 1..20: note = Description of Artificial Sequence: Synthetic oligonucleotide
  source 1..20: mol_type = other RNA
aactacccagccacagtgca

SEQ ID NO: 290 - RNA, 20 nt, synthetic construct
  misc_feature 1..20: note = Description of Artificial Sequence: Synthetic oligonucleotide
  source 1..20: mol_type = other RNA
ctccgagaacgggtctgagg

SEQ ID NO: 291 - RNA, 20 nt, synthetic construct
  misc_feature 1..20: note = Description of Artificial Sequence: Synthetic oligonucleotide
  source 1..20: mol_type = other RNA
aaaaccttctgggtctgttg

SEQ ID NO: 292 - RNA, 20 nt, synthetic construct
  misc_feature 1..20: note = Description of Artificial Sequence: Synthetic oligonucleotide
  source 1..20: mol_type = other RNA
tataaggtgcttctaattgt

SEQ ID NO: 293 - RNA, 20 nt, synthetic construct
  misc_feature 1..20: note = Description of Artificial Sequence: Synthetic oligonucleotide
  source 1..20: mol_type = other RNA
tgggcatttttgcttgatct

SEQ ID NO: 294 - RNA, 20 nt, synthetic construct
  misc_feature 1..20: note = Description of Artificial Sequence: Synthetic oligonucleotide
  source 1..20: mol_type = other RNA
ttccccagctccaatactgt

SEQ ID NO: 295 - RNA, 20 nt, synthetic construct
  misc_feature 1..20: note = Description of Artificial Sequence: Synthetic oligonucleotide
  source 1..20: mol_type = other RNA
cagcaggcggctccgagaac

SEQ ID NO: 296 - RNA, 20 nt, synthetic construct
  misc_feature 1..20: note = Description of Artificial Sequence: Synthetic oligonucleotide
  source 1..20: mol_type = other RNA
ggttgccaaatcccatcctt

SEQ ID NO: 297 - RNA, 20 nt, synthetic construct
  misc_feature 1..20: note = Description of Artificial Sequence: Synthetic oligonucleotide
  source 1..20: mol_type = other RNA
gacgacagttctggagggta

SEQ ID NO: 298 - RNA, 20 nt, synthetic construct
  misc_feature 1..20: note = Description of Artificial Sequence: Synthetic oligonucleotide
  source 1..20: mol_type = other RNA
atactgttggcactagtggc

SEQ ID NO: 299 - RNA, 20 nt, synthetic construct
  misc_feature 1..20: note = Description of Artificial Sequence: Synthetic oligonucleotide
  source 1..20: mol_type = other RNA
cttcagcacacccaggggaa

SEQ ID NO: 300 - RNA, 20 nt, synthetic construct
  misc_feature 1..20: note = Description of Artificial Sequence: Synthetic oligonucleotide
  source 1..20: mol_type = other RNA
tggtagagcaagagtttaac

SEQ ID NO: 301 - RNA, 20 nt, synthetic construct
  misc_feature 1..20: note = Description of Artificial Sequence: Synthetic oligonucleotide
  source 1..20: mol_type = other RNA
cccgcaagaaagagcctccg

SEQ ID NO: 302 - RNA, 20 nt, synthetic construct
  misc_feature 1..20: note = Description of Artificial Sequence: Synthetic oligonucleotide
  source 1..20: mol_type = other RNA
tgtggggcacctggaatcga

SEQ ID NO: 303 - RNA, 20 nt, synthetic construct
  misc_feature 1..20: note = Description of Artificial Sequence: Synthetic oligonucleotide
  source 1..20: mol_type = other RNA
cggctccgagaacgggtctg

SEQ ID NO: 304 - RNA, 20 nt, synthetic construct
  misc_feature 1..20: note = Description of Artificial Sequence: Synthetic oligonucleotide
  source 1..20: mol_type = other RNA
gtgcctgtggctttagcaga

SEQ ID NO: 305 - RNA, 20 nt, synthetic construct
  misc_feature 1..20: note = Description of Artificial Sequence: Synthetic oligonucleotide
  source 1..20: mol_type = other RNA
ttgccagcttctcacctgtg

SEQ ID NO: 306 - RNA, 20 nt, synthetic construct
  misc_feature 1..20: note = Description of Artificial Sequence: Synthetic oligonucleotide
  source 1..20: mol_type = other RNA
gtttgttttccttaccttgg

SEQ ID NO: 307 - RNA, 20 nt, synthetic construct
  misc_feature 1..20: note = Description of Artificial Sequence: Synthetic oligonucleotide
  source 1..20: mol_type = other RNA
caggttcgctacacggcttc

SEQ ID NO: 308 - RNA, 20 nt, synthetic construct
  misc_feature 1..20: note = Description of Artificial Sequence: Synthetic oligonucleotide
  source 1..20: mol_type = other RNA
aactcacccgatggttcttc

SEQ ID NO: 309 - RNA, 20 nt, synthetic construct
  misc_feature 1..20: note = Description of Artificial Sequence: Synthetic oligonucleotide
  source 1..20: mol_type = other RNA
gctttcttcgttaggtgtgg

SEQ ID NO: 310 - RNA, 20 nt, synthetic construct
  misc_feature 1..20: note = Description of Artificial Sequence: Synthetic oligonucleotide
  source 1..20: mol_type = other RNA
caaacaagtaaatatggaac

SEQ ID NO: 311 - RNA, 20 nt, synthetic construct
  misc_feature 1..20: note = Description of Artificial Sequence: Synthetic oligonucleotide
  source 1..20: mol_type = other RNA
accccctcaagccccacctg

SEQ ID NO: 312 - RNA, 20 nt, synthetic construct
  misc_feature 1..20: note = Description of Artificial Sequence: Synthetic oligonucleotide
  source 1..20: mol_type = other RNA
gcagcaaccgggacggaggc

SEQ ID NO: 313 - RNA, 20 nt, synthetic construct
  misc_feature 1..20: note = Description of Artificial Sequence: Synthetic oligonucleotide
  source 1..20: mol_type = other RNA
aggagaagctgctggtatca

SEQ ID NO: 314 - RNA, 20 nt, synthetic construct
  misc_feature 1..20: note = Description of Artificial Sequence: Synthetic oligonucleotide
  source 1..20: mol_type = other RNA
tgtttgctgaccacagccat

SEQ ID NO: 315 - RNA, 20 nt, synthetic construct
  misc_feature 1..20: note = Description of Artificial Sequence: Synthetic oligonucleotide
  source 1..20: mol_type = other RNA
aaagattcagctgacatttg

SEQ ID NO: 316 - RNA, 20 nt, synthetic construct
  misc_feature 1..20: note = Description of Artificial Sequence: Synthetic oligonucleotide
  source 1..20: mol_type = other RNA
tgtccgttggcttcataaag

SEQ ID NO: 317 - RNA, 20 nt, synthetic construct
  misc_feature 1..20: note = Description of Artificial Sequence: Synthetic oligonucleotide
  source 1..20: mol_type = other RNA
cttggagccatggtggtaac

SEQ ID NO: 318 - RNA, 20 nt, synthetic construct
  misc_feature 1..20: note = Description of Artificial Sequence: Synthetic oligonucleotide
  source 1..20: mol_type = other RNA
agttctggagggtatggaga

SEQ ID NO: 319 - RNA, 20 nt, synthetic construct
  misc_feature 1..20: note = Description of Artificial Sequence: Synthetic oligonucleotide
  source 1..20: mol_type = other RNA
ccgcgggcctcgccccccgg

SEQ ID NO: 320 - RNA, 20 nt, synthetic construct
  misc_feature 1..20: note = Description of Artificial Sequence: Synthetic oligonucleotide
  source 1..20: mol_type = other RNA
cggcggcccgagatgttatc

SEQ ID NO: 321 - RNA, 20 nt, synthetic construct
  misc_feature 1..20: note = Description of Artificial Sequence: Synthetic oligonucleotide
  source 1..20: mol_type = other RNA
ttgcttttagctaaaaagac

SEQ ID NO: 322 - RNA, 20 nt, synthetic construct
  misc_feature 1..20: note = Description of Artificial Sequence: Synthetic oligonucleotide
  source 1..20: mol_type = other RNA
gaatagcagagactccggag

SEQ ID NO: 323 - RNA, 20 nt, synthetic construct
  misc_feature 1..20: note = Description of Artificial Sequence: Synthetic oligonucleotide
  source 1..20: mol_type = other RNA
ttacctgatcccagtgctta

SEQ ID NO: 324 - RNA, 20 nt, synthetic construct
  misc_feature 1..20: note = Description of Artificial Sequence: Synthetic oligonucleotide
  source 1..20: mol_type = other RNA
ctgtggggcacctggaatcg

SEQ ID NO: 325 - RNA, 20 nt, synthetic construct
  misc_feature 1..20: note = Description of Artificial Sequence: Synthetic oligonucleotide
  source 1..20: mol_type = other RNA
ctgtcgggcccagccgaggt

SEQ ID NO: 326 - RNA, 20 nt, synthetic construct
  misc_feature 1..20: note = Description of Artificial Sequence: Synthetic oligonucleotide
  source 1..20: mol_type = other RNA
agggccggcctgaggccctg

SEQ ID NO: 327 - RNA, 20 nt, synthetic construct
  misc_feature 1..20: note = Description of Artificial Sequence: Synthetic oligonucleotide
  source 1..20: mol_type = other RNA
ctgcagatgttttccactca

SEQ ID NO: 328 - RNA, 20 nt, synthetic construct
  misc_feature 1..20: note = Description of Artificial Sequence: Synthetic oligonucleotide
  source 1..20: mol_type = other RNA
gatgttatctgggaagaagg

SEQ ID NO: 329 - RNA, 20 nt, synthetic construct
  misc_feature 1..20: note = Description of Artificial Sequence: Synthetic oligonucleotide
  source 1..20: mol_type = other RNA
ctctgctattccagtttcca

SEQ ID NO: 330 - RNA, 20 nt, synthetic construct
  misc_feature 1..20: note = Description of Artificial Sequence: Synthetic oligonucleotide
  source 1..20: mol_type = other RNA
gaaggcatttacctttatag

SEQ ID NO: 331 - RNA, 20 nt, synthetic construct
  misc_feature 1..20: note = Description of Artificial Sequence: Synthetic oligonucleotide
  source 1..20: mol_type = other RNA
gaagaagatagtgaaaactc

SEQ ID NO: 332 - RNA, 20 nt, synthetic construct
  misc_feature 1..20: note = Description of Artificial Sequence: Synthetic oligonucleotide
  source 1..20: mol_type = other RNA
gccggccctactgtcgtgcc

SEQ ID NO: 333 - RNA, 20 nt, synthetic construct
  misc_feature 1..20: note = Description of Artificial Sequence: Synthetic oligonucleotide
  source 1..20: mol_type = other RNA
ggtggtgttgtgttttgatc

SEQ ID NO: 334 - RNA, 20 nt, synthetic construct
  misc_feature 1..20: note = Description of Artificial Sequence: Synthetic oligonucleotide
  source 1..20: mol_type = other RNA
gcctgggtctgcgaccccca

SEQ ID NO: 335 - RNA, 20 nt, synthetic construct
  misc_feature 1..20: note = Description of Artificial Sequence: Synthetic oligonucleotide
  source 1..20: mol_type = other RNA
ctgtattcagtttaatgtct

SEQ ID NO: 336 - RNA, 20 nt, synthetic construct
  misc_feature 1..20: note = Description of Artificial Sequence: Synthetic oligonucleotide
  source 1..20: mol_type = other RNA
gaactcggcagtaatatctc

SEQ ID NO: 337 - RNA, 20 nt, synthetic construct
  misc_feature 1..20: note = Description of Artificial Sequence: Synthetic oligonucleotide
  source 1..20: mol_type = other RNA
ctttcttcgttaggtgtgga

SEQ ID NO: 338 - RNA, 20 nt, synthetic construct
  misc_feature 1..20: note = Description of Artificial Sequence: Synthetic oligonucleotide
  source 1..20: mol_type = other RNA
ctagtggcaggagaagctgc

SEQ ID NO: 339 - RNA, 20 nt, synthetic construct
  misc_feature 1..20: note = Description of Artificial Sequence: Synthetic oligonucleotide
  source 1..20: mol_type = other RNA
caggaacacctggtgtggcc

SEQ ID NO: 340 - RNA, 20 nt, synthetic construct
  misc_feature 1..20: note = Description of Artificial Sequence: Synthetic oligonucleotide
  source 1..20: mol_type = other RNA
tgcgtcgcatttataaataa

SEQ ID NO: 341 - RNA, 20 nt, synthetic construct
  misc_feature 1..20: note = Description of Artificial Sequence: Synthetic oligonucleotide
  source 1..20: mol_type = other RNA
cgagatgttatctgggaaga

SEQ ID NO: 342 - RNA, 20 nt, synthetic construct
  misc_feature 1..20: note = Description of Artificial Sequence: Synthetic oligonucleotide
  source 1..20: mol_type = other RNA
gctcgacagttacaaagttt

SEQ ID NO: 343 - RNA, 20 nt, synthetic construct
  misc_feature 1..20: note = Description of Artificial Sequence: Synthetic oligonucleotide
  source 1..20: mol_type = other RNA
cgatgcctggccattctcaa

SEQ ID NO: 344 - RNA, 20 nt, synthetic construct
  misc_feature 1..20: note = Description of Artificial Sequence: Synthetic oligonucleotide
  source 1..20: mol_type = other RNA
aagtcctcctgcttgccctg

SEQ ID NO: 345 - RNA, 20 nt, synthetic construct
  misc_feature 1..20: note = Description of Artificial Sequence: Synthetic oligonucleotide
  source 1..20: mol_type = other RNA
ggccacctcagacccgttct

SEQ ID NO: 346 - RNA, 20 nt, synthetic construct
  misc_feature 1..20: note = Description of Artificial Sequence: Synthetic oligonucleotide
  source 1..20: mol_type = other RNA
attgaaagaacttcttaata

SEQ ID NO: 347 - RNA, 20 nt, synthetic construct
  misc_feature 1..20: note = Description of Artificial Sequence: Synthetic oligonucleotide
  source 1..20: mol_type = other RNA
gccatggtggtaacaggtct

SEQ ID NO: 348 - RNA, 20 nt, synthetic construct
  misc_feature 1..20: note = Description of Artificial Sequence: Synthetic oligonucleotide
  source 1..20: mol_type = other RNA
taggaggtccttacttggta

SEQ ID NO: 349 - RNA, 20 nt, synthetic construct
  misc_feature 1..20: note = Description of Artificial Sequence: Synthetic oligonucleotide
  source 1..20: mol_type = other RNA
ggaaactatgtagctgatct

SEQ ID NO: 350 - RNA, 20 nt, synthetic construct
  misc_feature 1..20: note = Description of Artificial Sequence: Synthetic oligonucleotide
  source 1..20: mol_type = other RNA
ttcctcaggtggggcttgag

SEQ ID NO: 351 - RNA, 20 nt, synthetic construct
  misc_feature 1..20: note = Description of Artificial Sequence: Synthetic oligonucleotide
  source 1..20: mol_type = other RNA
ctcgattccaggtgccccac

SEQ ID NO: 352 - RNA, 20 nt, synthetic construct
  misc_feature 1..20: note = Description of Artificial Sequence: Synthetic oligonucleotide
  source 1..20: mol_type = other RNA
accaaaaatccctttgagaa

SEQ ID NO: 353 - RNA, 20 nt, synthetic construct
  misc_feature 1..20: note = Description of Artificial Sequence: Synthetic oligonucleotide
  source 1..20: mol_type = other RNA
gggcctgtcgggcccagccg

SEQ ID NO: 354 - RNA, 20 nt, synthetic construct
  misc_feature 1..20: note = Description of Artificial Sequence: Synthetic oligonucleotide
  source 1..20: mol_type = other RNA
cggttccgccaggcccccgg

SEQ ID NO: 355 - RNA, 20 nt, synthetic construct
  misc_feature 1..20: note = Description of Artificial Sequence: Synthetic oligonucleotide
  source 1..20: mol_type = other RNA
aaggtaattattataggctc

SEQ ID NO: 356 - RNA, 20 nt, synthetic construct
  misc_feature 1..20: note = Description of Artificial Sequence: Synthetic oligonucleotide
  source 1..20: mol_type = other RNA
gttctctgtacccttcccct

SEQ ID NO: 357 - RNA, 20 nt, synthetic construct
  misc_feature 1..20: note = Description of Artificial Sequence: Synthetic oligonucleotide
  source 1..20: mol_type = other RNA
atactcatcttctgagaggt

SEQ ID NO: 358 - RNA, 20 nt, synthetic construct
  misc_feature 1..20: note = Description of Artificial Sequence: Synthetic oligonucleotide
  source 1..20: mol_type = other RNA
cgagacaccacagtttcttt

SEQ ID NO: 359 - RNA, 20 nt, synthetic construct
  misc_feature 1..20: note = Description of Artificial Sequence: Synthetic oligonucleotide
  source 1..20: mol_type = other RNA
ggtcagcaaacaagtaaata

SEQ ID NO: 360 - RNA, 20 nt, synthetic construct
  misc_feature 1..20: note = Description of Artificial Sequence: Synthetic oligonucleotide
  source 1..20: mol_type = other RNA
agaattgcagaccagttttt

SEQ ID NO: 361 - RNA, 20 nt, synthetic construct
  misc_feature 1..20: note = Description of Artificial Sequence: Synthetic oligonucleotide
  source 1..20: mol_type = other RNA
tgtgttttgatcgggtgttc

SEQ ID NO: 362 - RNA, 20 nt, synthetic construct
  misc_feature 1..20: note = Description of Artificial Sequence: Synthetic oligonucleotide
  source 1..20: mol_type = other RNA
gcttcagcacacccagggga

SEQ ID NO: 363 - RNA, 20 nt, synthetic construct
  misc_feature 1..20: note = Description of Artificial Sequence: Synthetic oligonucleotide
  source 1..20: mol_type = other RNA
gtaggaggtccttacttggt

SEQ ID NO: 364 - RNA, 20 nt, synthetic construct
  misc_feature 1..20: note = Description of Artificial Sequence: Synthetic oligonucleotide
  source 1..20: mol_type = other RNA
ttggcagtacgactgccagc

SEQ ID NO: 365 - RNA, 20 nt, synthetic construct
  misc_feature 1..20: note = Description of Artificial Sequence: Synthetic oligonucleotide
  source 1..20: mol_type = other RNA
ggagagagttgagagaggtg

SEQ ID NO: 366 - RNA, 20 nt, synthetic construct
  misc_feature 1..20: note = Description of Artificial Sequence: Synthetic oligonucleotide
  source 1..20: mol_type = other RNA
gtcggaccagccggcgcaag

SEQ ID NO: 367 - RNA, 20 nt, synthetic construct
  misc_feature 1..20: note = Description of Artificial Sequence: Synthetic oligonucleotide
  source 1..20: mol_type = other RNA
agaagaaaaacttcaggagt

SEQ ID NO: 368 - RNA, 20 nt, synthetic construct
  misc_feature 1..20: note = Description of Artificial Sequence: Synthetic oligonucleotide
  source 1..20: mol_type = other RNA
gctggccctgggacagcagg

SEQ ID NO: 369 - RNA, 20 nt, synthetic construct
  misc_feature 1..20: note = Description of Artificial Sequence: Synthetic oligonucleotide
  source 1..20: mol_type = other RNA
cagagagatggatgaaagct

SEQ ID NO: 370 - RNA, 20 nt, synthetic construct
  misc_feature 1..20: note = Description of Artificial Sequence: Synthetic oligonucleotide
  source 1..20: mol_type = other RNA
ttaagggagagagttgagag

SEQ ID NO: 371 - RNA, 20 nt, synthetic construct
  misc_feature 1..20: note = Description of Artificial Sequence: Synthetic oligonucleotide
  source 1..20: mol_type = other RNA
gggggcctggcggaaccgcc

SEQ ID NO: 372 - RNA, 20 nt, synthetic construct
  misc_feature 1..20: note = Description of Artificial Sequence: Synthetic oligonucleotide
  source 1..20: mol_type = other RNA
tacctgatcccagtgcttaa

SEQ ID NO: 373 - RNA, 20 nt, synthetic construct
  misc_feature 1..20: note = Description of Artificial Sequence: Synthetic oligonucleotide
  source 1..20: mol_type = other RNA
tgggaagaaggcggcagccg

SEQ ID NO: 374 - RNA, 20 nt, synthetic construct
  misc_feature 1..20: note = Description of Artificial Sequence: Synthetic oligonucleotide
  source 1..20: mol_type = other RNA
gctgggcccgacaggcccgc

SEQ ID NO: 375 - RNA, 20 nt, synthetic construct
  misc_feature 1..20: note = Description of Artificial Sequence: Synthetic oligonucleotide
  source 1..20: mol_type = other RNA
ctcttctggaacctctataa

SEQ ID NO: 376 - RNA, 20 nt, synthetic construct
  misc_feature 1..20: note = Description of Artificial Sequence: Synthetic oligonucleotide
  source 1..20: mol_type = other RNA
actgataatatctggaaaac

SEQ ID NO: 377 - RNA, 20 nt, synthetic construct
  misc_feature 1..20: note = Description of Artificial Sequence: Synthetic oligonucleotide
  source 1..20: mol_type = other RNA
cggaggggcgtcggaccagc

SEQ ID NO: 378 - RNA, 20 nt, synthetic construct
  misc_feature 1..20: note = Description of Artificial Sequence: Synthetic oligonucleotide
  source 1..20: mol_type = other RNA
tgtcacacttttggaagcca

SEQ ID NO: 379 - RNA, 20 nt, synthetic construct
  misc_feature 1..20: note = Description of Artificial Sequence: Synthetic oligonucleotide
  source 1..20: mol_type = other RNA
gcgcagcccgcgggcctgtc

SEQ ID NO: 380 - RNA, 20 nt, synthetic construct
  misc_feature 1..20: note = Description of Artificial Sequence: Synthetic oligonucleotide
  source 1..20: mol_type = other RNA
attccacgactcttctttgc

SEQ ID NO: 381 - RNA, 20 nt, synthetic construct
  misc_feature 1..20: note = Description of Artificial Sequence: Synthetic oligonucleotide
  source 1..20: mol_type = other RNA
atgcttctttgtattgctga

SEQ ID NO: 382 - RNA, 20 nt, synthetic construct
  misc_feature 1..20: note = Description of Artificial Sequence: Synthetic oligonucleotide
  source 1..20: mol_type = other RNA
ctttgagaatggccaggcat

SEQ ID NO: 383 - RNA, 20 nt, synthetic construct
  misc_feature 1..20: note = Description of Artificial Sequence: Synthetic oligonucleotide
  source 1..20: mol_type = other RNA
aagaattgcagaccagtttt

SEQ ID NO: 384 - RNA, 20 nt, synthetic construct
  misc_feature 1..20: note = Description of Artificial Sequence: Synthetic oligonucleotide
  source 1..20: mol_type = other RNA
ctgcctcgccaggccacacc

SEQ ID NO: 385 - RNA, 20 nt, synthetic construct
  misc_feature 1..20: note = Description of Artificial Sequence: Synthetic oligonucleotide
  source 1..20: mol_type = other RNA
ctgtgcaggaacacctggtg

SEQ ID NO: 386 - RNA, 20 nt, synthetic construct
  misc_feature 1..20: note = Description of Artificial Sequence: Synthetic oligonucleotide
  source 1..20: mol_type = other RNA
ggaataagagccccgagccc

SEQ ID NO: 387 - RNA, 20 nt, synthetic construct
  misc_feature 1..20: note = Description of Artificial Sequence: Synthetic oligonucleotide
  source 1..20: mol_type = other RNA
ccgggacggaggctggccct

SEQ ID NO: 388 - RNA, 20 nt, synthetic construct
  misc_feature 1..20: note = Description of Artificial Sequence: Synthetic oligonucleotide
  source 1..20: mol_type = other RNA
cggagccgcctgctgtccca

SEQ ID NO: 389 - RNA, 20 nt, synthetic construct
  misc_feature 1..20: note = Description of Artificial Sequence: Synthetic oligonucleotide
  source 1..20: mol_type = other RNA
cagagactccggaggggcgt

SEQ ID NO: 390 - RNA, 20 nt, synthetic construct
  misc_feature 1..20: note = Description of Artificial Sequence: Synthetic oligonucleotide
  source 1..20: mol_type = other RNA
ctgctgcttcagcacaccca

SEQ ID NO: 391 - RNA, 20 nt, synthetic construct
  misc_feature 1..20: note = Description of Artificial Sequence: Synthetic oligonucleotide
  source 1..20: mol_type = other RNA
gtgcatggtgctctgctgag

SEQ ID NO: 392 - RNA, 20 nt, synthetic construct
  misc_feature 1..20: note = Description of Artificial Sequence: Synthetic oligonucleotide
  source 1..20: mol_type = other RNA
acaggaaaggtaattattat

SEQ ID NO: 393 - RNA, 20 nt, synthetic construct
  misc_feature 1..20: note = Description of Artificial Sequence: Synthetic oligonucleotide
  source 1..20: mol_type = other RNA
tttccttccacagggcaagc

SEQ ID NO: 394 - RNA, 20 nt, synthetic construct
  misc_feature 1..20: note = Description of Artificial Sequence: Synthetic oligonucleotide
  source 1..20: mol_type = other RNA
cagccggcgcaagcgggcga

SEQ ID NO: 395 - RNA, 20 nt, synthetic construct
  misc_feature 1..20: note = Description of Artificial Sequence: Synthetic oligonucleotide
  source 1..20: mol_type = other RNA
tgcatggtgctctgctgagt

SEQ ID NO: 396 - RNA, 20 nt, synthetic construct
  misc_feature 1..20: note = Description of Artificial Sequence: Synthetic oligonucleotide
  source 1..20: mol_type = other RNA
gctgctgcttcagcacaccc

SEQ ID NO: 397 - RNA, 20 nt, synthetic construct
  misc_feature 1..20: note = Description of Artificial Sequence: Synthetic oligonucleotide
  source 1..20: mol_type = other RNA
tgtcgggcccagccgaggtc

SEQ ID NO: 398 - RNA, 20 nt, synthetic construct
  misc_feature 1..20: note = Description of Artificial Sequence: Synthetic oligonucleotide
  source 1..20: mol_type = other RNA
cgtgctgatccctgggctcg

SEQ ID NO: 399 - RNA, 20 nt, synthetic construct
  misc_feature 1..20: note = Description of Artificial Sequence: Synthetic oligonucleotide
  source 1..20: mol_type = other RNA
gcggttccgccaggcccccg

SEQ ID NO: 400 - RNA, 20 nt, synthetic construct
  misc_feature 1..20: note = Description of Artificial Sequence: Synthetic oligonucleotide
  source 1..20: mol_type = other RNA
acacactacttactgttata

SEQ ID NO: 401 - RNA, 20 nt, synthetic construct
  misc_feature 1..20: note = Description of Artificial Sequence: Synthetic oligonucleotide
  source 1..20: mol_type = other RNA
taagcctgtgtcccttggcc

SEQ ID NO: 402 - RNA, 20 nt, synthetic construct
  misc_feature 1..20: note = Description of Artificial Sequence: Synthetic oligonucleotide
  source 1..20: mol_type = other RNA
gcagtccaaaggatgggatt

SEQ ID NO: 403 - RNA, 20 nt, synthetic construct
  misc_feature 1..20: note = Description of Artificial Sequence: Synthetic oligonucleotide
  source 1..20: mol_type = other RNA
ggcccagccgaggtcgggcc

SEQ ID NO: 404 - RNA, 20 nt, synthetic construct
  misc_feature 1..20: note = Description of Artificial Sequence: Synthetic oligonucleotide
  source 1..20: mol_type = other RNA
acacctggtgtggcctggcg

SEQ ID NO: 405 - RNA, 20 nt, synthetic construct
  misc_feature 1..20: note = Description of Artificial Sequence: Synthetic oligonucleotide
  source 1..20: mol_type = other RNA
gatccaagtgtcaatttgtt

SEQ ID NO: 406 - RNA, 20 nt, synthetic construct
  misc_feature 1..20: note = Description of Artificial Sequence: Synthetic oligonucleotide
  source 1..20: mol_type = other RNA
tcaaatgtcagctgaatctt

SEQ ID NO: 407 - RNA, 20 nt, synthetic construct
  misc_feature 1..20: note = Description of Artificial Sequence: Synthetic oligonucleotide
  source 1..20: mol_type = other RNA
gggcccagccgaggtcgggc

SEQ ID NO: 408 - RNA, 20 nt, synthetic construct
  misc_feature 1..20: note = Description of Artificial Sequence: Synthetic oligonucleotide
  source 1..20: mol_type = other RNA
cgacaggcccgcgggctgcg

SEQ ID NO: 409 - RNA, 20 nt, synthetic construct
  misc_feature 1..20: note = Description of Artificial Sequence: Synthetic oligonucleotide
  source 1..20: mol_type = other RNA
ggtcatgaggaagtcggctc

SEQ ID NO: 410 - RNA, 20 nt, synthetic construct
  misc_feature 1..20: note = Description of Artificial Sequence: Synthetic oligonucleotide
  source 1..20: mol_type = other RNA
tccgcgggcctcgccccccg

SEQ ID NO: 411 - RNA, 20 nt, synthetic construct
  misc_feature 1..20: note = Description of Artificial Sequence: Synthetic oligonucleotide
  source 1..20: mol_type = other RNA
ctcgttggcgtgctgatccc

SEQ ID NO: 412 - RNA, 20 nt, synthetic construct
  misc_feature 1..20: note = Description of Artificial Sequence: Synthetic oligonucleotide
  source 1..20: mol_type = other RNA
acgagacaccacagtttctt

SEQ ID NO: 413 - RNA, 20 nt, synthetic construct
  misc_feature 1..20: note = Description of Artificial Sequence: Synthetic oligonucleotide
  source 1..20: mol_type = other RNA
tgtgtcccttggccaggcat

SEQ ID NO: 414 - RNA, 20 nt, synthetic construct
  misc_feature 1..20: note = Description of Artificial Sequence: Synthetic oligonucleotide
  source 1..20: mol_type = other RNA
gaggaagagctcacccctgc

SEQ ID NO: 415 - RNA, 20 nt, synthetic construct
  misc_feature 1..20: note = Description of Artificial Sequence: Synthetic oligonucleotide
  source 1..20: mol_type = other RNA
cggctgcagcggcagcaacc

SEQ ID NO: 416 - RNA, 20 nt, synthetic construct
  misc_feature 1..20: note = Description of Artificial Sequence: Synthetic oligonucleotide
  source 1..20: mol_type = other RNA
agttctctgtacccttcccc

SEQ ID NO: 417 - RNA, 20 nt, synthetic construct
  misc_feature 1..20: note = Description of Artificial Sequence: Synthetic oligonucleotide
  source 1..20: mol_type = other RNA
ccgcggaggctctttcttgc

SEQ ID NO: 418 - RNA, 20 nt, synthetic construct
  misc_feature 1..20: note = Description of Artificial Sequence: Synthetic oligonucleotide
  source 1..20: mol_type = other RNA
gagaaatgccaaagcagaga

SEQ ID NO: 419 - RNA, 20 nt, synthetic construct
  misc_feature 1..20: note = Description of Artificial Sequence: Synthetic oligonucleotide
  source 1..20: mol_type = other RNA
gaagaaggcggcagccgcgg

SEQ ID NO: 420 - RNA, 20 nt, synthetic construct
  misc_feature 1..20: note = Description of Artificial Sequence: Synthetic oligonucleotide
  source 1..20: mol_type = other RNA
cccccggcccgacctcggct

SEQ ID NO: 421 - RNA, 20 nt, synthetic construct
  misc_feature 1..20: note = Description of Artificial Sequence: Synthetic oligonucleotide
  source 1..20: mol_type = other RNA
ggctgggcccgacaggcccg

SEQ ID NO: 422 - RNA, 20 nt, synthetic construct
  misc_feature 1..20: note = Description of Artificial Sequence: Synthetic oligonucleotide
  source 1..20: mol_type = other RNA
tctgcgacccccatggaaac

SEQ ID NO: 423 - RNA, 20 nt, synthetic construct
  misc_feature 1..20: note = Description of Artificial Sequence: Synthetic oligonucleotide
  source 1..20: mol_type = other RNA
gcctgaggccctgcggaccc

SEQ ID NO: 424 - RNA, 20 nt, synthetic construct
  misc_feature 1..20: note = Description of Artificial Sequence: Synthetic oligonucleotide
  source 1..20: mol_type = other RNA
aggtggtgttgtgttttgat

SEQ ID NO: 425 - RNA, 20 nt, synthetic construct
  misc_feature 1..20: note = Description of Artificial Sequence: Synthetic oligonucleotide
  source 1..20: mol_type = other RNA
ttcattttcttcctcaggtg

SEQ ID NO: 426 - RNA, 20 nt, synthetic construct
  misc_feature 1..20: note = Description of Artificial Sequence: Synthetic oligonucleotide
  source 1..20: mol_type = other RNA
ttaccttcgcccgcttgcgc

SEQ ID NO: 427 - RNA, 20 nt, synthetic construct
  misc_feature 1..20: note = Description of Artificial Sequence: Synthetic oligonucleotide
  source 1..20: mol_type = other RNA
gcccagccgaggtcgggccg

SEQ ID NO: 428 - RNA, 20 nt, synthetic construct
  misc_feature 1..20: note = Description of Artificial Sequence: Synthetic oligonucleotide
  source 1..20: mol_type = other RNA
cccagggccagcctccgtcc

SEQ ID NO: 429 - RNA, 20 nt, synthetic construct
  misc_feature 1..20: note = Description of Artificial Sequence: Synthetic oligonucleotide
  source 1..20: mol_type = other RNA
ccggggggcgaggcccgcgg

SEQ ID NO: 430 - RNA, 20 nt, synthetic construct
  misc_feature 1..20: note = Description of Artificial Sequence: Synthetic oligonucleotide
  source 1..20: mol_type = other RNA
tcttcctcaggtggggcttg

SEQ ID NO: 431 - RNA, 20 nt, synthetic construct
  misc_feature 1..20: note = Description of Artificial Sequence: Synthetic oligonucleotide
  source 1..20: mol_type = other RNA
cgacctcggctgggcccgac

SEQ ID NO: 432 - RNA, 20 nt, synthetic construct
  misc_feature 1..20: note = Description of Artificial Sequence: Synthetic oligonucleotide
  source 1..20: mol_type = other RNA
tatggagacggccaagcatc

SEQ ID NO: 433 - RNA, 20 nt, synthetic construct
  misc_feature 1..20: note = Description of Artificial Sequence: Synthetic oligonucleotide
  source 1..20: mol_type = other RNA
tatgttgctgcaggatcatc

SEQ ID NO: 434 - RNA, 20 nt, synthetic construct
  misc_feature 1..20: note = Description of Artificial Sequence: Synthetic oligonucleotide
  source 1..20: mol_type = other RNA
cttcttcccagataacatct

SEQ ID NO: 435 - RNA, 20 nt, synthetic construct
  misc_feature 1..20: note = Description of Artificial Sequence: Synthetic oligonucleotide
  source 1..20: mol_type = other RNA
gccattctcaaagggatttt

SEQ ID NO: 436 - RNA, 20 nt, synthetic construct
  misc_feature 1..20: note = Description of Artificial Sequence: Synthetic oligonucleotide
  source 1..20: mol_type = other RNA
ggcgtgctgatccctgggct

SEQ ID NO: 437 - RNA, 20 nt, synthetic construct
  misc_feature 1..20: note = Description of Artificial Sequence: Synthetic oligonucleotide
  source 1..20: mol_type = other RNA
ctcgccccccgggggcctgg

SEQ ID NO: 438 - RNA, 20 nt, synthetic construct
  misc_feature 1..20: note = Description of Artificial Sequence: Synthetic oligonucleotide
  source 1..20: mol_type = other RNA
gagacagacaaatacttgat

SEQ ID NO: 439 - RNA, 20 nt, synthetic construct
  misc_feature 1..20: note = Description of Artificial Sequence: Synthetic oligonucleotide
  source 1..20: mol_type = other RNA
gggtccgcagggcctcaggc

SEQ ID NO: 440 - RNA, 20 nt, synthetic construct
  misc_feature 1..20: note = Description of Artificial Sequence: Synthetic oligonucleotide
  source 1..20: mol_type = other RNA
actcctggcccctcgattcc

SEQ ID NO: 441 - RNA, 20 nt, synthetic construct
  misc_feature 1..20: note = Description of Artificial Sequence: Synthetic oligonucleotide
  source 1..20: mol_type = other RNA
cgcgcagcccgcgggcctgt

SEQ ID NO: 442 - RNA, 20 nt, synthetic construct
  misc_feature 1..20: note = Description of Artificial Sequence: Synthetic oligonucleotide
  source 1..20: mol_type = other RNA
gtgcgctcccccaccgcccc

SEQ ID NO: 443 - RNA, 20 nt, synthetic construct
  misc_feature 1..20: note = Description of Artificial Sequence: Synthetic oligonucleotide
  source 1..20: mol_type = other RNA
ctttcattttcttcctcagg

SEQ ID NO: 444 - RNA, 20 nt, synthetic construct
  misc_feature 1..20: note = Description of Artificial Sequence: Synthetic oligonucleotide
  source 1..20: mol_type = other RNA
gaggctggccctgggacagc

SEQ ID NO: 445 - RNA, 20 nt, synthetic construct
  misc_feature 1..20: note = Description of Artificial Sequence: Synthetic oligonucleotide
  source 1..20: mol_type = other RNA
tgccaccctcacctgatgct

SEQ ID NO: 446 - RNA, 20 nt, synthetic construct
  misc_feature 1..20: note = Description of Artificial Sequence: Synthetic oligonucleotide
  source 1..20: mol_type = other RNA
gaggtggccgcgcagcccgc

SEQ ID NO: 447 - RNA, 20 nt, synthetic construct
  misc_feature 1..20: note = Description of Artificial Sequence: Synthetic oligonucleotide
  source 1..20: mol_type = other RNA
tttcattttcttcctcaggt

SEQ ID NO: 448 - RNA, 20 nt, synthetic construct
  misc_feature 1..20: note = Description of Artificial Sequence: Synthetic oligonucleotide
  source 1..20: mol_type = other RNA
atcgaggggccaggagtgat

SEQ ID NO: 449 - RNA, 20 nt, synthetic construct
  misc_feature 1..20: note = Description of Artificial Sequence: Synthetic oligonucleotide
  source 1..20: mol_type = other RNA
cggctggtccgacgcccctc

SEQ ID NO: 450 - RNA, 20 nt, synthetic construct
  misc_feature 1..20: note = Description of Artificial Sequence: Synthetic oligonucleotide
  source 1..20: mol_type = other RNA
cgggggcctggcggaaccgc

SEQ ID NO: 451 - RNA, 20 nt, synthetic construct
  misc_feature 1..20: note = Description of Artificial Sequence: Synthetic oligonucleotide
  source 1..20: mol_type = other RNA
cttctcacctgtggggcacc

SEQ ID NO: 452 - RNA, 20 nt, synthetic construct
  misc_feature 1..20: note = Description of Artificial Sequence: Synthetic oligonucleotide
  source 1..20: mol_type = other RNA
aggtcgggccgggggcggtg

SEQ ID NO: 453 - RNA, 20 nt, synthetic construct
  misc_feature 1..20: note = Description of Artificial Sequence: Synthetic oligonucleotide
  source 1..20: mol_type = other RNA
cgctgcagccgccgccgccg

SEQ ID NO: 454 - RNA, 20 nt, synthetic construct
  misc_feature 1..20: note = Description of Artificial Sequence: Synthetic oligonucleotide
  source 1..20: mol_type = other RNA
agagcaccatgcactgtggc

SEQ ID NO: 455 - RNA, 20 nt, synthetic construct
  misc_feature 1..20: note = Description of Artificial Sequence: Synthetic oligonucleotide
  source 1..20: mol_type = other RNA
cccagccgaggtcgggccgg

SEQ ID NO: 456 - RNA, 20 nt, synthetic construct
  misc_feature 1..20: note = Description of Artificial Sequence: Synthetic oligonucleotide
  source 1..20: mol_type = other RNA
gactgctgtgcaggaacacc

SEQ ID NO: 457 - RNA, 20 nt, synthetic construct
  misc_feature 1..20: note = Description of Artificial Sequence: Synthetic oligonucleotide
  source 1..20: mol_type = other RNA
aggctctggggtctcaggct

SEQ ID NO: 458 - RNA, 20 nt, synthetic construct
  misc_feature 1..20: note = Description of Artificial Sequence: Synthetic oligonucleotide
  source 1..20: mol_type = other RNA
tgaggtggccgcgcagcccg

SEQ ID NO: 459 - RNA, 20 nt, synthetic construct
  misc_feature 1..20: note = Description of Artificial Sequence: Synthetic oligonucleotide
  source 1..20: mol_type = other RNA
gcgtgctgatccctgggctc

SEQ ID NO: 460 - RNA, 20 nt, synthetic construct
  misc_feature 1..20: note = Description of Artificial Sequence: Synthetic oligonucleotide
  source 1..20: mol_type = other RNA
cttcgcccgcttgcgccggc

SEQ ID NO: 461 - RNA, 20 nt, synthetic construct
  misc_feature 1..20: note = Description of Artificial Sequence: Synthetic oligonucleotide
  source 1..20: mol_type = other RNA
gcacctggaatcgaggggcc

SEQ ID NO: 462 - RNA, 20 nt, synthetic construct
  misc_feature 1..20: note = Description of Artificial Sequence: Synthetic oligonucleotide
  source 1..20: mol_type = other RNA
tcctaaagagaaagatgaaa

SEQ ID NO: 463 - RNA, 20 nt, synthetic construct
  misc_feature 1..20: note = Description of Artificial Sequence: Synthetic oligonucleotide
  source 1..20: mol_type = other RNA
atgcttggggactgctgtgc

SEQ ID NO: 464 - RNA, 20 nt, synthetic construct
  misc_feature 1..20: note = Description of Artificial Sequence: Synthetic oligonucleotide
  source 1..20: mol_type = other RNA
aatgaaaagaaaaaccttct

SEQ ID NO: 465 - RNA, 20 nt, synthetic construct
  misc_feature 1..20: note = Description of Artificial Sequence: Synthetic oligonucleotide
  source 1..20: mol_type = other RNA
gcggaaccgccggggtccgc

SEQ ID NO: 466 - RNA, 20 nt, synthetic construct
  misc_feature 1..20: note = Description of Artificial Sequence: Synthetic oligonucleotide
  source 1..20: mol_type = other RNA
gaggtcgggccgggggcggt

SEQ ID NO: 467 - RNA, 20 nt, synthetic construct
  misc_feature 1..20: note = Description of Artificial Sequence: Synthetic oligonucleotide
  source 1..20: mol_type = other RNA
attataggctctggggtctc

SEQ ID NO: 468 - RNA, 20 nt, synthetic construct
  misc_feature 1..20: note = Description of Artificial Sequence: Synthetic oligonucleotide
  source 1..20: mol_type = other RNA
tcactttcattttcttcctc

SEQ ID NO: 469 - RNA, 20 nt, synthetic construct
  misc_feature 1..20: note = Description of Artificial Sequence: Synthetic oligonucleotide
  source 1..20: mol_type = other RNA
tcggagccgcctgctgtccc

SEQ ID NO: 470 - RNA, 20 nt, synthetic construct
  misc_feature 1..20: note = Description of Artificial Sequence: Synthetic oligonucleotide
  source 1..20: mol_type = other RNA
agccgaggtcgggccggggg

SEQ ID NO: 471 - RNA, 20 nt, synthetic construct
  misc_feature 1..20: note = Description of Artificial Sequence: Synthetic oligonucleotide
  source 1..20: mol_type = other RNA
aaagctagaagaaaaacttc

SEQ ID NO: 472 - RNA, 20 nt, synthetic construct
  misc_feature 1..20: note = Description of Artificial Sequence: Synthetic oligonucleotide
  source 1..20: mol_type = other RNA
tcctcaggtggggcttgagg

SEQ ID NO: 473 - RNA, 20 nt, synthetic construct
  misc_feature 1..20: note = Description of Artificial Sequence: Synthetic oligonucleotide
  source 1..20: mol_type = other RNA
cggcggttccgccaggcccc

SEQ ID NO: 474 - RNA, 20 nt, synthetic construct
  misc_feature 1..20: note = Description of Artificial Sequence: Synthetic oligonucleotide
  source 1..20: mol_type = other RNA
tgcatctgtctcacatgctt

SEQ ID NO: 475 - RNA, 20 nt, synthetic construct
  misc_feature 1..20: note = Description of Artificial Sequence: Synthetic oligonucleotide
  source 1..20: mol_type = other RNA
ggcggttccgccaggccccc

SEQ ID NO: 476 - RNA, 20 nt, synthetic construct
  misc_feature 1..20: note = Description of Artificial Sequence: Synthetic oligonucleotide
  source 1..20: mol_type = other RNA
accgggacggaggctggccc

SEQ ID NO: 477 - RNA, 20 nt, synthetic construct
  misc_feature 1..20: note = Description of Artificial Sequence: Synthetic oligonucleotide
  source 1..20: mol_type = other RNA
caccgcccccggcccgacct

SEQ ID NO: 478 - RNA, 20 nt, synthetic construct
  misc_feature 1..20: note = Description of Artificial Sequence: Synthetic oligonucleotide
  source 1..20: mol_type = other RNA
cgccaggcccccggggggcg

SEQ ID NO: 479 - RNA, 20 nt, synthetic construct
  misc_feature 1..20: note = Description of Artificial Sequence: Synthetic oligonucleotide
  source 1..20: mol_type = other RNA
ggggtgagctcttcctcttc

SEQ ID NO: 480 - RNA, 20 nt, synthetic construct
  misc_feature 1..20: note = Description of Artificial Sequence: Synthetic oligonucleotide
  source 1..20: mol_type = other RNA
accatttcatctttctcttt

SEQ ID NO: 481 - RNA, 20 nt, synthetic construct
  misc_feature 1..20: note = Description of Artificial Sequence: Synthetic oligonucleotide
  source 1..20: mol_type = other RNA
ggcctcgccccccgggggcc

SEQ ID NO: 482 - RNA, 20 nt, synthetic construct
  misc_feature 1..20: note = Description of Artificial Sequence: Synthetic oligonucleotide
  source 1..20: mol_type = other RNA
gcccccggcccgacctcggc

SEQ ID NO: 483 - RNA, 20 nt, synthetic construct
  misc_feature 1..20: note = Description of Artificial Sequence: Synthetic oligonucleotide
  source 1..20: mol_type = other RNA
tggggcttgagggggtggtg

SEQ ID NO: 484 - RNA, 20 nt, synthetic construct
  misc_feature 1..20: note = Description of Artificial Sequence: Synthetic oligonucleotide
  source 1..20: mol_type = other RNA
gccggggtccgcagggcctc

SEQ ID NO: 485 - RNA, 20 nt, synthetic construct
  misc_feature 1..20: note = Description of Artificial Sequence: Synthetic oligonucleotide
  source 1..20: mol_type = other RNA
cttcttttccttctctgctt

SEQ ID NO: 486 - RNA, 20 nt, synthetic construct
  misc_feature 1..20: note = Description of Artificial Sequence: Synthetic oligonucleotide
  source 1..20: mol_type = other RNA
cctccgcgggcctcgccccc

SEQ ID NO: 487 - RNA, 20 nt, synthetic construct
  misc_feature 1..20: note = Description of Artificial Sequence: Synthetic oligonucleotide
  source 1..20: mol_type = other RNA
ctccgcgggcctcgcccccc

SEQ ID NO: 488 - RNA, 20 nt, synthetic construct
  misc_feature 1..20: note = Description of Artificial Sequence: Synthetic oligonucleotide
  source 1..20: mol_type = other RNA
ggtcgggccgggggcggtgg

SEQ ID NO: 489 - RNA, 20 nt, synthetic construct
  misc_feature 1..20: note = Description of Artificial Sequence: Synthetic oligonucleotide
  source 1..20: mol_type = other RNA
tggaatggatgtcacacttt

SEQ ID NO: 490 - RNA, 20 nt, synthetic construct
  misc_feature 1..20: note = Description of Artificial Sequence: Synthetic oligonucleotide
  source 1..20: mol_type = other RNA
cttcctcaggtggggcttga

SEQ ID NO: 491 - RNA, 20 nt, synthetic construct
  misc_feature 1..20: note = Description of Artificial Sequence: Synthetic oligonucleotide
  source 1..20: mol_type = other RNA
gtggggcttgagggggtggt

SEQ ID NO: 492 - RNA, 20 nt, synthetic construct
  misc_feature 1..20: note = Description of Artificial Sequence: Synthetic oligonucleotide
  source 1..20: mol_type = other RNA
gcggctgcagcggcagcaac

SEQ ID NO: 493 - RNA, 20 nt, synthetic construct
  misc_feature 1..20: note = Description of Artificial Sequence: Synthetic oligonucleotide
  source 1..20: mol_type = other RNA
cccccggggggcgaggcccg

SEQ ID NO: 494 - RNA, 20 nt, synthetic construct
  misc_feature 1..20: note = Description of Artificial Sequence: Synthetic oligonucleotide
  source 1..20: mol_type = other RNA
taatgaaaagaaaaaccttc

SEQ ID NO: 495 - RNA, 20 nt, synthetic construct
  misc_feature 1..20: note = Description of Artificial Sequence: Synthetic oligonucleotide
  source 1..20: mol_type = other RNA
cgcggcggcggcggctgcag

SEQ ID NO: 496 - RNA, 20 nt, synthetic construct
  misc_feature 1..20: note = Description of Artificial Sequence: Synthetic oligonucleotide
  source 1..20: mol_type = other RNA
tcaggtggggcttgaggggg

SEQ ID NO: 497 - RNA, 20 nt, synthetic construct
  misc_feature 1..20: note = Description of Artificial Sequence: Synthetic oligonucleotide
  source 1..20: mol_type = other RNA
ggtggggcttgagggggtgg

SEQ ID NO: 498 - RNA, 20 nt, synthetic construct
  misc_feature 1..20: note = Description of Artificial Sequence: Synthetic oligonucleotide
  source 1..20: mol_type = other RNA
tggaaatgactatgatttaa

SEQ ID NO: 499 - RNA, 20 nt, synthetic construct
  misc_feature 1..20: note = Description of Artificial Sequence: Synthetic oligonucleotide
  source 1..20: mol_type = other RNA
ggggcttgagggggtggtgg

SEQ ID NO: 500 - RNA, 20 nt, synthetic construct
  misc_feature 1..20: note = Description of Artificial Sequence: Synthetic oligonucleotide
  source 1..20: mol_type = other RNA
cgaggtcgggccgggggcgg

SEQ ID NO: 501 - RNA, 20 nt, synthetic construct
  misc_feature 1..20: note = Description of Artificial Sequence: Synthetic oligonucleotide
  source 1..20: mol_type = other RNA
ggcggcagccgcggcggcgg

SEQ ID NO: 502 - RNA, 20 nt, synthetic construct
  misc_feature 1..20: note = Description of Artificial Sequence: Synthetic oligonucleotide
  source 1..20: mol_type = other RNA
gaaggcggcagccgcggcgg

SEQ ID NO: 503 - RNA, 20 nt, synthetic construct
  misc_feature 1..20: note = Description of Artificial Sequence: Synthetic oligonucleotide
  source 1..20: mol_type = other RNA
agtgcgacaggttcgctaca

SEQ ID NO: 504 - RNA, 20 nt, synthetic construct
  misc_feature 1..20: note = Description of Artificial Sequence: Synthetic oligonucleotide
  source 1..20: mol_type = other RNA
tggaatagcagagactccgg

SEQ ID NO: 505 - RNA, 20 nt, synthetic construct
  misc_feature 1..20: note = Description of Artificial Sequence: Synthetic oligonucleotide
  source 1..20: mol_type = other RNA
ctaaataactgtgaactcgg

SEQ ID NO: 506 - RNA, 20 nt, synthetic construct
  misc_feature 1..20: note = Description of Artificial Sequence: Synthetic oligonucleotide
  source 1..20: mol_type = other RNA
tgctattccagtttccatgg

SEQ ID NO: 507 - RNA, 20 nt, synthetic construct
  misc_feature 1..20: note = Description of Artificial Sequence: Synthetic oligonucleotide
  source 1..20: mol_type = other RNA
cagacccaggcacgacagta

SEQ ID NO: 508 - RNA, 20 nt, synthetic construct
  misc_feature 1..20: note = Description of Artificial Sequence: Synthetic oligonucleotide
  source 1..20: mol_type = other RNA
tttctgaaacaggatcgtgt

SEQ ID NO: 509 - RNA, 20 nt, synthetic construct
  misc_feature 1..20: note = Description of Artificial Sequence: Synthetic oligonucleotide
  source 1..20: mol_type = other RNA
tgagaagtcatccggtcatg

SEQ ID NO: 510 - RNA, 20 nt, synthetic construct
  misc_feature 1..20: note = Description of Artificial Sequence: Synthetic oligonucleotide
  source 1..20: mol_type = other RNA
gaattgcagaccagtttttg

SEQ ID NO: 511 - RNA, 20 nt, synthetic construct
  misc_feature 1..20: note = Description of Artificial Sequence: Synthetic oligonucleotide
  source 1..20: mol_type = other RNA
cgagttgccacatttcgcaa

SEQ ID NO: 512 - RNA, 20 nt, synthetic construct
  misc_feature 1..20: note = Description of Artificial Sequence: Synthetic oligonucleotide
  source 1..20: mol_type = other RNA
ctgaaacaggatcgtgtggg

SEQ ID NO: 513 - RNA, 20 nt, synthetic construct
  misc_feature 1..20: note = Description of Artificial Sequence: Synthetic oligonucleotide
  source 1..20: mol_type = other RNA
ggcggcccgagatgttatct

SEQ ID NO: 514 - RNA, 20 nt, synthetic construct
  misc_feature 1..20: note = Description of Artificial Sequence: Synthetic oligonucleotide
  source 1..20: mol_type = other RNA
tgtataccacaccttgcata

SEQ ID NO: 515 - RNA, 20 nt, synthetic construct
  misc_feature 1..20: note = Description of Artificial Sequence: Synthetic oligonucleotide
  source 1..20: mol_type = other RNA
tcttagtgaaaagcaaacac

SEQ ID NO: 516 - RNA, 20 nt, synthetic construct
  misc_feature 1..20: note = Description of Artificial Sequence: Synthetic oligonucleotide
  source 1..20: mol_type = other RNA
atgtataccacaccttgcat

SEQ ID NO: 517 - RNA, 20 nt, synthetic construct
  misc_feature 1..20: note = Description of Artificial Sequence: Synthetic oligonucleotide
  source 1..20: mol_type = other RNA
gggatttggcaaccttaaca

SEQ ID NO: 518 - RNA, 20 nt, synthetic construct
  misc_feature 1..20: note = Description of Artificial Sequence: Synthetic oligonucleotide
  source 1..20: mol_type = other RNA
ttgtgccacctctccctgag

SEQ ID NO: 519 - RNA, 20 nt, synthetic construct
  misc_feature 1..20: note = Description of Artificial Sequence: Synthetic oligonucleotide
  source 1..20: mol_type = other RNA
ggatctgaccgccctatgca

SEQ ID NO: 520 - RNA, 20 nt, synthetic construct
  misc_feature 1..20: note = Description of Artificial Sequence: Synthetic oligonucleotide
  source 1..20: mol_type = other RNA
accaagacctgttaccacca

SEQ ID NO: 521 - RNA, 20 nt, synthetic construct
  misc_feature 1..20: note = Description of Artificial Sequence: Synthetic oligonucleotide
  source 1..20: mol_type = other RNA
cgtcatggtcttatcaactt

SEQ ID NO: 522 - RNA, 20 nt, synthetic construct
  misc_feature 1..20: note = Description of Artificial Sequence: Synthetic oligonucleotide
  source 1..20: mol_type = other RNA
tgaagtctagttgatgacta

SEQ ID NO: 523 - RNA, 20 nt, synthetic construct
  misc_feature 1..20: note = Description of Artificial Sequence: Synthetic oligonucleotide
  source 1..20: mol_type = other RNA
cacagttatttagagcgtca

SEQ ID NO: 524 - RNA, 20 nt, synthetic construct
  misc_feature 1..20: note = Description of Artificial Sequence: Synthetic oligonucleotide
  source 1..20: mol_type = other RNA
tcggcagtaatatctctggg

SEQ ID NO: 525 - RNA, 20 nt, synthetic construct
  misc_feature 1..20: note = Description of Artificial Sequence: Synthetic oligonucleotide
  source 1..20: mol_type = other RNA
tgccaacagtattggagctg

SEQ ID NO: 526 - RNA, 20 nt, synthetic construct
  misc_feature 1..20: note = Description of Artificial Sequence: Synthetic oligonucleotide
  source 1..20: mol_type = other RNA
gcatctgtctcacatgcttg

SEQ ID NO: 527 - RNA, 20 nt, synthetic construct
  misc_feature 1..20: note = Description of Artificial Sequence: Synthetic oligonucleotide
  source 1..20: mol_type = other RNA
agtgccaacagtattggagc

SEQ ID NO: 528 - RNA, 20 nt, synthetic construct
  misc_feature 1..20: note = Description of Artificial Sequence: Synthetic oligonucleotide
  source 1..20: mol_type = other RNA
acatctgcagtccaaaggat

SEQ ID NO: 529 - RNA, 20 nt, synthetic construct
  misc_feature 1..20: note = Description of Artificial Sequence: Synthetic oligonucleotide
  source 1..20: mol_type = other RNA
ggcacaaactgaacggctgg

SEQ ID NO: 530 - RNA, 20 nt, synthetic construct
  misc_feature 1..20: note = Description of Artificial Sequence: Synthetic oligonucleotide
  source 1..20: mol_type = other RNA
tggcagtacgactgccagca

SEQ ID NO: 531 - RNA, 20 nt, synthetic construct
  misc_feature 1..20: note = Description of Artificial Sequence: Synthetic oligonucleotide
  source 1..20: mol_type = other RNA
aagatgagcagattgaacat

SEQ ID NO: 532 - RNA, 20 nt, synthetic construct
  misc_feature 1..20: note = Description of Artificial Sequence: Synthetic oligonucleotide
  source 1..20: mol_type = other RNA
ggtaattattataggctctg

SEQ ID NO: 533 - RNA, 20 nt, synthetic construct
  misc_feature 1..20: note = Description of Artificial Sequence: Synthetic oligonucleotide
  source 1..20: mol_type = other RNA
cgcggaggctctttcttgcg

SEQ ID NO: 534 - RNA, 20 nt, synthetic construct
  misc_feature 1..20: note = Description of Artificial Sequence: Synthetic oligonucleotide
  source 1..20: mol_type = other RNA
ataagtgacgatgtgattgt

SEQ ID NO: 535 - RNA, 20 nt, synthetic construct
  misc_feature 1..20: note = Description of Artificial Sequence: Synthetic oligonucleotide
  source 1..20: mol_type = other RNA
ggcagtacgactgccagcag

SEQ ID NO: 536 - RNA, 20 nt, synthetic construct
  misc_feature 1..20: note = Description of Artificial Sequence: Synthetic oligonucleotide
  source 1..20: mol_type = other RNA
tgcccgaacaaattgacact

SEQ ID NO: 537 - RNA, 20 nt, synthetic construct
  misc_feature 1..20: note = Description of Artificial Sequence: Synthetic oligonucleotide
  source 1..20: mol_type = other RNA
ggaaaacatctgcagtccaa

SEQ ID NO: 538 - RNA, 20 nt, synthetic construct
  misc_feature 1..20: note = Description of Artificial Sequence: Synthetic oligonucleotide
  source 1..20: mol_type = other RNA
actgaatacagcagtgcgac

SEQ ID NO: 539 - RNA, 20 nt, synthetic construct
  misc_feature 1..20: note = Description of Artificial Sequence: Synthetic oligonucleotide
  source 1..20: mol_type = other RNA
tttgcttttcactaagaact

SEQ ID NO: 540 - RNA, 20 nt, synthetic construct
  misc_feature 1..20: note = Description of Artificial Sequence: Synthetic oligonucleotide
  source 1..20: mol_type = other RNA
ctggcagccacctgacagta

SEQ ID NO: 541 - RNA, 20 nt, synthetic construct
  misc_feature 1..20: note = Description of Artificial Sequence: Synthetic oligonucleotide
  source 1..20: mol_type = other RNA
gcagacccaggcacgacagt

SEQ ID NO: 542 - RNA, 20 nt, synthetic construct
  misc_feature 1..20: note = Description of Artificial Sequence: Synthetic oligonucleotide
  source 1..20: mol_type = other RNA
gggacacaggcttattattg

SEQ ID NO: 543 - RNA, 20 nt, synthetic construct
  misc_feature 1..20: note = Description of Artificial Sequence: Synthetic oligonucleotide
  source 1..20: mol_type = other RNA
tggctactcgtgtgtgcctg

SEQ ID NO: 544 - RNA, 20 nt, synthetic construct
  misc_feature 1..20: note = Description of Artificial Sequence: Synthetic oligonucleotide
  source 1..20: mol_type = other RNA
aacatctgcagtccaaagga

SEQ ID NO: 545 - RNA, 20 nt, synthetic construct
  misc_feature 1..20: note = Description of Artificial Sequence: Synthetic oligonucleotide
  source 1..20: mol_type = other RNA
cccaggcacgacagtagggc

SEQ ID NO: 546 - RNA, 20 nt, synthetic construct
  misc_feature 1..20: note = Description of Artificial Sequence: Synthetic oligonucleotide
  source 1..20: mol_type = other RNA
cttagtgaaaagcaaacaca

SEQ ID NO: 547 - RNA, 20 nt, synthetic construct
  misc_feature 1..20: note = Description of Artificial Sequence: Synthetic oligonucleotide
  source 1..20: mol_type = other RNA
tctcccgcaaagaagagtcg

SEQ ID NO: 548 - RNA, 20 nt, synthetic construct
  misc_feature 1..20: note = Description of Artificial Sequence: Synthetic oligonucleotide
  source 1..20: mol_type = other RNA
gtcaatttgttcgggcatgt

SEQ ID NO: 549 - RNA, 20 nt, synthetic construct
  misc_feature 1..20: note = Description of Artificial Sequence: Synthetic oligonucleotide
  source 1..20: mol_type = other RNA
ctgctattccagtttccatg

SEQ ID NO: 550 - RNA, 20 nt, synthetic construct
  misc_feature 1..20: note = Description of Artificial Sequence: Synthetic oligonucleotide
  source 1..20: mol_type = other RNA
gaataagagccccgagccca

SEQ ID NO: 551 - RNA, 20 nt, synthetic construct
  misc_feature 1..20: note = Description of Artificial Sequence: Synthetic oligonucleotide
  source 1..20: mol_type = other RNA
aagtgagcctgaagaaccat

SEQ ID NO: 552 - RNA, 20 nt, synthetic construct
  misc_feature 1..20: note = Description of Artificial Sequence: Synthetic oligonucleotide
  source 1..20: mol_type = other RNA
tttgctttcttcgttaggtg

SEQ ID NO: 553 - RNA, 20 nt, synthetic construct
  misc_feature 1..20: note = Description of Artificial Sequence: Synthetic oligonucleotide
  source 1..20: mol_type = other RNA
atttctgaaacaggatcgtg

SEQ ID NO: 554 - RNA, 20 nt, synthetic construct
  misc_feature 1..20: note = Description of Artificial Sequence: Synthetic oligonucleotide
  source 1..20: mol_type = other RNA
gagaggtggcacaaactgaa

SEQ ID NO: 555 - RNA, 20 nt, synthetic construct
  misc_feature 1..20: note = Description of Artificial Sequence: Synthetic oligonucleotide
  source 1..20: mol_type = other RNA
gtccgttggcttcataaagt

SEQ ID NO: 556 - RNA, 20 nt, synthetic construct
  misc_feature 1..20: note = Description of Artificial Sequence: Synthetic oligonucleotide
  source 1..20: mol_type = other RNA
acgacagtagggccggcctg

SEQ ID NO: 557 - RNA, 20 nt, synthetic construct
  misc_feature 1..20: note = Description of Artificial Sequence: Synthetic oligonucleotide
  source 1..20: mol_type = other RNA
ataccacaccttgcataggg

SEQ ID NO: 558 - RNA, 20 nt, synthetic construct
  misc_feature 1..20: note = Description of Artificial Sequence: Synthetic oligonucleotide
  source 1..20: mol_type = other RNA
gctctaaataactgtgaact

SEQ ID NO: 559 - RNA, 20 nt, synthetic construct
  misc_feature 1..20: note = Description of Artificial Sequence: Synthetic oligonucleotide
  source 1..20: mol_type = other RNA
aggagggaatcctatggctg

SEQ ID NO: 560 - RNA, 20 nt, synthetic construct
  misc_feature 1..20: note = Description of Artificial Sequence: Synthetic oligonucleotide
  source 1..20: mol_type = other RNA
ataaataaaggtttgactcg

SEQ ID NO: 561 - RNA, 20 nt, synthetic construct
  misc_feature 1..20: note = Description of Artificial Sequence: Synthetic oligonucleotide
  source 1..20: mol_type = other RNA
ctggcgaggcagcgtataca

SEQ ID NO: 562 - RNA, 20 nt, synthetic construct
  misc_feature 1..20: note = Description of Artificial Sequence: Synthetic oligonucleotide
  source 1..20: mol_type = other RNA
agctgatcttggagccatgg

SEQ ID NO: 563 - RNA, 20 nt, synthetic construct
  misc_feature 1..20: note = Description of Artificial Sequence: Synthetic oligonucleotide
  source 1..20: mol_type = other RNA
taaaggtttgactcgtggag

SEQ ID NO: 564 - RNA, 20 nt, synthetic construct
  misc_feature 1..20: note = Description of Artificial Sequence: Synthetic oligonucleotide
  source 1..20: mol_type = other RNA
agtagccattccttactgtc

SEQ ID NO: 565 - RNA, 20 nt, synthetic construct
  misc_feature 1..20: note = Description of Artificial Sequence: Synthetic oligonucleotide
  source 1..20: mol_type = other RNA
gttttccactcagggagagg

SEQ ID NO: 566 - RNA, 20 nt, synthetic construct
  misc_feature 1..20: note = Description of Artificial Sequence: Synthetic oligonucleotide
  source 1..20: mol_type = other RNA
tggaccacaacagacccaga

SEQ ID NO: 567 - RNA, 20 nt, synthetic construct
  misc_feature 1..20: note = Description of Artificial Sequence: Synthetic oligonucleotide
  source 1..20: mol_type = other RNA
gatgaattagctgaaacaca

SEQ ID NO: 568 - RNA, 20 nt, synthetic construct
  misc_feature 1..20: note = Description of Artificial Sequence: Synthetic oligonucleotide
  source 1..20: mol_type = other RNA
agtgagcctgaagaaccatc

SEQ ID NO: 569 - RNA, 20 nt, synthetic construct
  misc_feature 1..20: note = Description of Artificial Sequence: Synthetic oligonucleotide
  source 1..20: mol_type = other RNA
cggaaccgccggggtccgca

SEQ ID NO: 570 - RNA, 20 nt, synthetic construct
  misc_feature 1..20: note = Description of Artificial Sequence: Synthetic oligonucleotide
  source 1..20: mol_type = other RNA
tcaacttcggcatctataag

SEQ ID NO: 571 - RNA, 20 nt, synthetic construct
  misc_feature 1..20: note = Description of Artificial Sequence: Synthetic oligonucleotide
  source 1..20: mol_type = other RNA
gtggggcacctggaatcgag

SEQ ID NO: 572 - RNA, 20 nt, synthetic construct
  misc_feature 1..20: note = Description of Artificial Sequence: Synthetic oligonucleotide
  source 1..20: mol_type = other RNA
atagtttcctttgcgaaatg

SEQ ID NO: 573 - RNA, 20 nt, synthetic construct
  misc_feature 1..20: note = Description of Artificial Sequence: Synthetic oligonucleotide
  source 1..20: mol_type = other RNA
ggaatagcagagactccgga

SEQ ID NO: 574 - RNA, 20 nt, synthetic construct
  misc_feature 1..20: note = Description of Artificial Sequence: Synthetic oligonucleotide
  source 1..20: mol_type = other RNA
agccacctgacagtaaggaa

SEQ ID NO: 575 - RNA, 20 nt, synthetic construct
  misc_feature 1..20: note = Description of Artificial Sequence: Synthetic oligonucleotide
  source 1..20: mol_type = other RNA
atggctcagccaatcactcc

SEQ ID NO: 576 - RNA, 20 nt, synthetic construct
  misc_feature 1..20: note = Description of Artificial Sequence: Synthetic oligonucleotide
  source 1..20: mol_type = other RNA
agcggcagcaaccgggacgg

SEQ ID NO: 577 - RNA, 20 nt, synthetic construct
  misc_feature 1..20: note = Description of Artificial Sequence: Synthetic oligonucleotide
  source 1..20: mol_type = other RNA
agttggaagcgaatccccca

SEQ ID NO: 578 - RNA, 20 nt, synthetic construct
  misc_feature 1..20: note = Description of Artificial Sequence: Synthetic oligonucleotide
  source 1..20: mol_type = other RNA
cttttagcccaaagaaactg

SEQ ID NO: 579 - RNA, 20 nt, synthetic construct
  misc_feature 1..20: note = Description of Artificial Sequence: Synthetic oligonucleotide
  source 1..20: mol_type = other RNA
aagatgtagcttctagcaac

SEQ ID NO: 580 - RNA, 20 nt, synthetic construct
  misc_feature 1..20: note = Description of Artificial Sequence: Synthetic oligonucleotide
  source 1..20: mol_type = other RNA
ccggccctactgtcgtgcct

SEQ ID NO: 581 - RNA, 20 nt, synthetic construct
  misc_feature 1..20: note = Description of Artificial Sequence: Synthetic oligonucleotide
  source 1..20: mol_type = other RNA
agagccgacttcctcatgac

SEQ ID NO: 582 - RNA, 20 nt, synthetic construct
  misc_feature 1..20: note = Description of Artificial Sequence: Synthetic oligonucleotide
  source 1..20: mol_type = other RNA
aataatactcatcttctgag

SEQ ID NO: 583 - RNA, 20 nt, synthetic construct
  misc_feature 1..20: note = Description of Artificial Sequence: Synthetic oligonucleotide
  source 1..20: mol_type = other RNA
ctgcttcttgagaagtcatc

SEQ ID NO: 584 - RNA, 20 nt, synthetic construct
  misc_feature 1..20: note = Description of Artificial Sequence: Synthetic oligonucleotide
  source 1..20: mol_type = other RNA
aggccttctgctaaagccac

SEQ ID NO: 585 - RNA, 20 nt, synthetic construct
  misc_feature 1..20: note = Description of Artificial Sequence: Synthetic oligonucleotide
  source 1..20: mol_type = other RNA
gaatgacaacttccaatgcc

SEQ ID NO: 586 - RNA, 20 nt, synthetic construct
  misc_feature 1..20: note = Description of Artificial Sequence: Synthetic oligonucleotide
  source 1..20: mol_type = other RNA
ccgcaagaaagagcctccgc

SEQ ID NO: 587 - RNA, 20 nt, synthetic construct
  misc_feature 1..20: note = Description of Artificial Sequence: Synthetic oligonucleotide
  source 1..20: mol_type = other RNA
tgctgcttcagcacacccag

SEQ ID NO: 588 - RNA, 20 nt, synthetic construct
  misc_feature 1..20: note = Description of Artificial Sequence: Synthetic oligonucleotide
  source 1..20: mol_type = other RNA
aacttccaatgcctggccaa

SEQ ID NO: 589 - RNA, 20 nt, synthetic construct
  misc_feature 1..20: note = Description of Artificial Sequence: Synthetic oligonucleotide
  source 1..20: mol_type = other RNA
aaaggtttgactcgtggagc

SEQ ID NO: 590 - RNA, 20 nt, synthetic construct
  misc_feature 1..20: note = Description of Artificial Sequence: Synthetic oligonucleotide
  source 1..20: mol_type = other RNA
gtgccaacagtattggagct

SEQ ID NO: 591 - RNA, 20 nt, synthetic construct
  misc_feature 1..20: note = Description of Artificial Sequence: Synthetic oligonucleotide
  source 1..20: mol_type = other RNA
gccactagtgccaacagtat

SEQ ID NO: 592 - RNA, 20 nt, synthetic construct
  misc_feature 1..20: note = Description of Artificial Sequence: Synthetic oligonucleotide
  source 1..20: mol_type = other RNA
tagggcaagctaccttgtta

SEQ ID NO: 593 - RNA, 20 nt, synthetic construct
  misc_feature 1..20: note = Description of Artificial Sequence: Synthetic oligonucleotide
  source 1..20: mol_type = other RNA
caactctctcccttaagcac

SEQ ID NO: 594 - RNA, 20 nt, synthetic construct
  misc_feature 1..20: note = Description of Artificial Sequence: Synthetic oligonucleotide
  source 1..20: mol_type = other RNA
tcatccggtcatgaggaagt

SEQ ID NO: 595 - RNA, 20 nt, synthetic construct
  misc_feature 1..20: note = Description of Artificial Sequence: Synthetic oligonucleotide
  source 1..20: mol_type = other RNA
gatgcctggccattctcaaa

SEQ ID NO: 596 - RNA, 20 nt, synthetic construct
  misc_feature 1..20: note = Description of Artificial Sequence: Synthetic oligonucleotide
  source 1..20: mol_type = other RNA
tgttttccagatattatcag

SEQ ID NO: 597 - RNA, 20 nt, synthetic construct
  misc_feature 1..20: note = Description of Artificial Sequence: Synthetic oligonucleotide
  source 1..20: mol_type = other RNA
atgcatctgtctcacatgct

SEQ ID NO: 598 - RNA, 20 nt, synthetic construct
  misc_feature 1..20: note = Description of Artificial Sequence: Synthetic oligonucleotide
  source 1..20: mol_type = other RNA
gattccacgactcttctttg

SEQ ID NO: 599 - RNA, 20 nt, synthetic construct
  misc_feature 1..20: note = Description of Artificial Sequence: Synthetic oligonucleotide
  source 1..20: mol_type = other RNA
tggtagcagtgcagtacctc

SEQ ID NO: 600 - RNA, 20 nt, synthetic construct
  misc_feature 1..20: note = Description of Artificial Sequence: Synthetic oligonucleotide
  source 1..20: mol_type = other RNA
aactctctcccttaagcact

SEQ ID NO: 601 - RNA, 20 nt, synthetic construct
  misc_feature 1..20: note = Description of Artificial Sequence: Synthetic oligonucleotide
  source 1..20: mol_type = other RNA
tcgacttacagcttgtccgt

SEQ ID NO: 602 - RNA, 20 nt, synthetic construct
  misc_feature 1..20: note = Description of Artificial Sequence: Synthetic oligonucleotide
  source 1..20: mol_type = other RNA
aggaggtccttacttggtag

SEQ ID NO: 603 - RNA, 20 nt, synthetic construct
  misc_feature 1..20: note = Description of Artificial Sequence: Synthetic oligonucleotide
  source 1..20: mol_type = other RNA
gcactgtggctgggtagtta

SEQ ID NO: 604 - RNA, 20 nt, synthetic construct
  misc_feature 1..20: note = Description of Artificial Sequence: Synthetic oligonucleotide
  source 1..20: mol_type = other RNA
ataggtagagtacagagaga

SEQ ID NO: 605 - RNA, 20 nt, synthetic construct
  misc_feature 1..20: note = Description of Artificial Sequence: Synthetic oligonucleotide
  source 1..20: mol_type = other RNA
cggaccccggcggttccgcc

SEQ ID NO: 606 - RNA, 20 nt, synthetic construct
  misc_feature 1..20: note = Description of Artificial Sequence: Synthetic oligonucleotide
  source 1..20: mol_type = other RNA
ttttctaggagggaatccta

SEQ ID NO: 607 - RNA, 20 nt, synthetic construct
  misc_feature 1..20: note = Description of Artificial Sequence: Synthetic oligonucleotide
  source 1..20: mol_type = other RNA
gagcaccatgcactgtggct

SEQ ID NO: 608 - RNA, 20 nt, synthetic construct
  misc_feature 1..20: note = Description of Artificial Sequence: Synthetic oligonucleotide
  source 1..20: mol_type = other RNA
tgcccactttatgaagccaa

SEQ ID NO: 609 - RNA, 20 nt, synthetic construct
  misc_feature 1..20: note = Description of Artificial Sequence: Synthetic oligonucleotide
  source 1..20: mol_type = other RNA
ctcccttaagcactgggatc

SEQ ID NO: 610 - RNA, 20 nt, synthetic construct
  misc_feature 1..20: note = Description of Artificial Sequence: Synthetic oligonucleotide
  source 1..20: mol_type = other RNA
gcaaagaagagtcgtggaat

SEQ ID NO: 611 - RNA, 20 nt, synthetic construct
  misc_feature 1..20: note = Description of Artificial Sequence: Synthetic oligonucleotide
  source 1..20: mol_type = other RNA
cccgcggaggctctttcttg

SEQ ID NO: 612 - RNA, 20 nt, synthetic construct
  misc_feature 1..20: note = Description of Artificial Sequence: Synthetic oligonucleotide
  source 1..20: mol_type = other RNA
agatgatcctgcagcaacat

SEQ ID NO: 613 - RNA, 20 nt, synthetic construct
  misc_feature 1..20: note = Description of Artificial Sequence: Synthetic oligonucleotide
  source 1..20: mol_type = other RNA
aattgcagaccagtttttgg

SEQ ID NO: 614 - RNA, 20 nt, synthetic construct
  misc_feature 1..20: note = Description of Artificial Sequence: Synthetic oligonucleotide
  source 1..20: mol_type = other RNA
tgtggtccactgataatatc

SEQ ID NO: 615 - RNA, 20 nt, synthetic construct
  misc_feature 1..20: note = Description of Artificial Sequence: Synthetic oligonucleotide
  source 1..20: mol_type = other RNA
tttagctaaaaagacaggaa

SEQ ID NO: 616 - RNA, 20 nt, synthetic construct
  misc_feature 1..20: note = Description of Artificial Sequence: Synthetic oligonucleotide
  source 1..20: mol_type = other RNA
tctgctattccagtttccat

SEQ ID NO: 617 - RNA, 20 nt, synthetic construct
  misc_feature 1..20: note = Description of Artificial Sequence: Synthetic oligonucleotide
  source 1..20: mol_type = other RNA
acagcaggcggctccgagaa

SEQ ID NO: 618 - RNA, 20 nt, synthetic construct
  misc_feature 1..20: note = Description of Artificial Sequence: Synthetic oligonucleotide
  source 1..20: mol_type = other RNA
atgtcacacttttggaagcc

SEQ ID NO: 619 - RNA, 20 nt, synthetic construct
  misc_feature 1..20: note = Description of Artificial Sequence: Synthetic oligonucleotide
  source 1..20: mol_type = other RNA
ttcttcccagataacatctc

SEQ ID NO: 620 - RNA, 20 nt, synthetic construct
  misc_feature 1..20: note = Description of Artificial Sequence: Synthetic oligonucleotide
  source 1..20: mol_type = other RNA
catgtatacgctgcctcgcc

SEQ ID NO: 621 - RNA, 20 nt, synthetic construct
  misc_feature 1..20: note = Description of Artificial Sequence: Synthetic oligonucleotide
  source 1..20: mol_type = other RNA
gctgagtgggctgcgagaag

SEQ ID NO: 622 - RNA, 20 nt, synthetic construct
  misc_feature 1..20: note = Description of Artificial Sequence: Synthetic oligonucleotide
  source 1..20: mol_type = other RNA
tcgttggcgtgctgatccct

SEQ ID NO: 623 - RNA, 20 nt, synthetic construct
  misc_feature 1..20: note = Description of Artificial Sequence: Synthetic oligonucleotide
  source 1..20: mol_type = other RNA
tcggaccagccggcgcaagc

SEQ ID NO: 624 - RNA, 20 nt, synthetic construct
  misc_feature 1..20: note = Description of Artificial Sequence: Synthetic oligonucleotide
  source 1..20: mol_type = other RNA
agccattccttactgtcagg

SEQ ID NO: 625 - RNA, 20 nt, synthetic construct
  misc_feature 1..20: note = Description of Artificial Sequence: Synthetic oligonucleotide
  source 1..20: mol_type = other RNA
tgtgattgttggccgatgcc

SEQ ID NO: 626 - RNA, 20 nt, synthetic construct
  misc_feature 1..20: note = Description of Artificial Sequence: Synthetic oligonucleotide
  source 1..20: mol_type = other RNA
aataataagcctgtgtccct

SEQ ID NO: 627 - RNA, 20 nt, synthetic construct
  misc_feature 1..20: note = Description of Artificial Sequence: Synthetic oligonucleotide
  source 1..20: mol_type = other RNA
ggttccgccaggcccccggg

SEQ ID NO: 628 - RNA, 20 nt, synthetic construct
  misc_feature 1..20: note = Description of Artificial Sequence: Synthetic oligonucleotide
  source 1..20: mol_type = other RNA
tccaatactgttggcactag

SEQ ID NO: 629 - RNA, 20 nt, synthetic construct
  misc_feature 1..20: note = Description of Artificial Sequence: Synthetic oligonucleotide
  source 1..20: mol_type = other RNA
tgtagctgatcttggagcca

SEQ ID NO: 630 - RNA, 20 nt, synthetic construct
  misc_feature 1..20: note = Description of Artificial Sequence: Synthetic oligonucleotide
  source 1..20: mol_type = other RNA
tccatgggggtcgcagaccc

SEQ ID NO: 631 - RNA, 20 nt, synthetic construct
  misc_feature 1..20: note = Description of Artificial Sequence: Synthetic oligonucleotide
  source 1..20: mol_type = other RNA
aaatccctttgagaatggcc

SEQ ID NO: 632 - RNA, 20 nt, synthetic construct
  misc_feature 1..20: note = Description of Artificial Sequence: Synthetic oligonucleotide
  source 1..20: mol_type = other RNA
ggtggcacaaactgaacggc

SEQ ID NO: 633 - RNA, 20 nt, synthetic construct
  misc_feature 1..20: note = Description of Artificial Sequence: Synthetic oligonucleotide
  source 1..20: mol_type = other RNA
aactggaatagcagagactc

SEQ ID NO: 634 - RNA, 20 nt, synthetic construct
  misc_feature 1..20: note = Description of Artificial Sequence: Synthetic oligonucleotide
  source 1..20: mol_type = other RNA
tgcagcggcagcaaccggga

SEQ ID NO: 635 - RNA, 20 nt, synthetic construct
  misc_feature 1..20: note = Description of Artificial Sequence: Synthetic oligonucleotide
  source 1..20: mol_type = other RNA
tcttattcctatgttgctgc

SEQ ID NO: 636 - RNA, 20 nt, synthetic construct
  misc_feature 1..20: note = Description of Artificial Sequence: Synthetic oligonucleotide
  source 1..20: mol_type = other RNA
tatacatggcccccaaaaac

SEQ ID NO: 637 - RNA, 20 nt, synthetic construct
  misc_feature 1..20: note = Description of Artificial Sequence: Synthetic oligonucleotide
  source 1..20: mol_type = other RNA
aatgcctggccaagggacac

SEQ ID NO: 638 - RNA, 20 nt, synthetic construct
  misc_feature 1..20: note = Description of Artificial Sequence: Synthetic oligonucleotide
  source 1..20: mol_type = other RNA
aagaaactgtggtgtctcgt

SEQ ID NO: 639 - RNA, 20 nt, synthetic construct
  misc_feature 1..20: note = Description of Artificial Sequence: Synthetic oligonucleotide
  source 1..20: mol_type = other RNA
tttaaatgcagctgcagttg

SEQ ID NO: 640 - RNA, 20 nt, synthetic construct
  misc_feature 1..20: note = Description of Artificial Sequence: Synthetic oligonucleotide
  source 1..20: mol_type = other RNA
tgaggccctgcggaccccgg

SEQ ID NO: 641 - RNA, 20 nt, synthetic construct
  misc_feature 1..20: note = Description of Artificial Sequence: Synthetic oligonucleotide
  source 1..20: mol_type = other RNA
aggtaattattataggctct

SEQ ID NO: 642 - RNA, 20 nt, synthetic construct
  misc_feature 1..20: note = Description of Artificial Sequence: Synthetic oligonucleotide
  source 1..20: mol_type = other RNA
gtgttttgatcgggtgttct

SEQ ID NO: 643 - RNA, 20 nt, synthetic construct
  misc_feature 1..20: note = Description of Artificial Sequence: Synthetic oligonucleotide
  source 1..20: mol_type = other RNA
gatgatgactttgagttcac

SEQ ID NO: 644 - RNA, 20 nt, synthetic construct
  misc_feature 1..20: note = Description of Artificial Sequence: Synthetic oligonucleotide
  source 1..20: mol_type = other RNA
atccaagtgtcaatttgttc

SEQ ID NO: 645 - RNA, 20 nt, synthetic construct
  misc_feature 1..20: note = Description of Artificial Sequence: Synthetic oligonucleotide
  source 1..20: mol_type = other RNA
ggggcctggcggaaccgccg

SEQ ID NO: 646 - RNA, 20 nt, synthetic construct
  misc_feature 1..20: note = Description of Artificial Sequence: Synthetic oligonucleotide
  source 1..20: mol_type = other RNA
gatgttttccactcagggag

SEQ ID NO: 647 - RNA, 20 nt, synthetic construct
  misc_feature 1..20: note = Description of Artificial Sequence: Synthetic oligonucleotide
  source 1..20: mol_type = other RNA
aatgcagctgcagttgtggt

SEQ ID NO: 648 - RNA, 20 nt, synthetic construct
  misc_feature 1..20: note = Description of Artificial Sequence: Synthetic oligonucleotide
  source 1..20: mol_type = other RNA
cagcagagcaccatgcactg

SEQ ID NO: 649 - RNA, 20 nt, synthetic construct
  misc_feature 1..20: note = Description of Artificial Sequence: Synthetic oligonucleotide
  source 1..20: mol_type = other RNA
ctgagtgggctgcgagaagc

SEQ ID NO: 650 - RNA, 20 nt, synthetic construct
  misc_feature 1..20: note = Description of Artificial Sequence: Synthetic oligonucleotide
  source 1..20: mol_type = other RNA
ctttatagaggttccagaag

SEQ ID NO: 651 - RNA, 20 nt, synthetic construct
  misc_feature 1..20: note = Description of Artificial Sequence: Synthetic oligonucleotide
  source 1..20: mol_type = other RNA
acagttacaaagttttggaa

SEQ ID NO: 652 - RNA, 20 nt, synthetic construct
  misc_feature 1..20: note = Description of Artificial Sequence: Synthetic oligonucleotide
  source 1..20: mol_type = other RNA
caacttccaatgcctggcca

SEQ ID NO: 653 - RNA, 20 nt, synthetic construct
  misc_feature 1..20: note = Description of Artificial Sequence: Synthetic oligonucleotide
  source 1..20: mol_type = other RNA
aactcggcagtaatatctct

SEQ ID NO: 654 - RNA, 20 nt, synthetic construct
  misc_feature 1..20: note = Description of Artificial Sequence: Synthetic oligonucleotide
  source 1..20: mol_type = other RNA
aactacccagccacagtgca

SEQ ID NO: 655 - RNA, 20 nt, synthetic construct
  misc_feature 1..20: note = Description of Artificial Sequence: Synthetic oligonucleotide
  source 1..20: mol_type = other RNA
actgcagatgttttccactc

SEQ ID NO: 656 - RNA, 20 nt, synthetic construct
  misc_feature 1..20: note = Description of Artificial Sequence: Synthetic oligonucleotide
  source 1..20: mol_type = other RNA
tataaggtgcttctaattgt

SEQ ID NO: 657 - RNA, 20 nt, synthetic construct
  misc_feature 1..20: note = Description of Artificial Sequence: Synthetic oligonucleotide
  source 1..20: mol_type = other RNA
ctccgagaacgggtctgagg

SEQ ID NO: 658 - RNA, 20 nt, synthetic construct
  misc_feature 1..20: note = Description of Artificial Sequence: Synthetic oligonucleotide
  source 1..20: mol_type = other RNA
aaaaccttctgggtctgttg

SEQ ID NO: 659 - RNA, 20 nt, synthetic construct
  misc_feature 1..20: note = Description of Artificial Sequence: Synthetic oligonucleotide
  source 1..20: mol_type = other RNA
tgggcatttttgcttgatct

SEQ ID NO: 660 - RNA, 20 nt, synthetic construct
  misc_feature 1..20: note = Description of Artificial Sequence: Synthetic oligonucleotide
  source 1..20: mol_type = other RNA
ggttgccaaatcccatcctt

SEQ ID NO: 661 - RNA, 20 nt, synthetic construct
  misc_feature 1..20: note = Description of Artificial Sequence: Synthetic oligonucleotide
  source 1..20: mol_type = other RNA
cagcaggcggctccgagaac

SEQ ID NO: 662 - RNA, 20 nt, synthetic construct
  misc_feature 1..20: note = Description of Artificial Sequence: Synthetic oligonucleotide
  source 1..20: mol_type = other RNA
ttccccagctccaatactgt

SEQ ID NO: 663 - RNA, 20 nt, synthetic construct
  misc_feature 1..20: note = Description of Artificial Sequence: Synthetic oligonucleotide
  source 1..20: mol_type = other RNA
atactgttggcactagtggc

SEQ ID NO: 664 - RNA, 20 nt, synthetic construct
  misc_feature 1..20: note = Description of Artificial Sequence: Synthetic oligonucleotide
  source 1..20: mol_type = other RNA
cttcagcacacccaggggaa

SEQ ID NO: 665 - RNA, 20 nt, synthetic construct
  misc_feature 1..20: note = Description of Artificial Sequence: Synthetic oligonucleotide
  source 1..20: mol_type = other RNA
tggtagagcaagagtttaac

SEQ ID NO: 666 - RNA, 20 nt, synthetic construct
  misc_feature 1..20: note = Description of Artificial Sequence: Synthetic oligonucleotide
  source 1..20: mol_type = other RNA
cccgcaagaaagagcctccg

SEQ ID NO: 667 - RNA, 20 nt, synthetic construct
  misc_feature 1..20: note = Description of Artificial Sequence: Synthetic oligonucleotide
  source 1..20: mol_type = other RNA
tgtggggcacctggaatcga

SEQ ID NO: 668 - RNA, 20 nt, synthetic construct
  misc_feature 1..20: note = Description of Artificial Sequence: Synthetic oligonucleotide
  source 1..20: mol_type = other RNA
cggctccgagaacgggtctg

SEQ ID NO: 669 - RNA, 20 nt, synthetic construct
  misc_feature 1..20: note = Description of Artificial Sequence: Synthetic oligonucleotide
  source 1..20: mol_type = other RNA
caggttcgctacacggcttc

SEQ ID NO: 670 - RNA, 20 nt, synthetic construct
  misc_feature 1..20: note = Description of Artificial Sequence: Synthetic oligonucleotide
  source 1..20: mol_type = other RNA
ttgccagcttctcacctgtg

SEQ ID NO: 671 - RNA, 20 nt, synthetic construct
  misc_feature 1..20: note = Description of Artificial Sequence: Synthetic oligonucleotide
  source 1..20: mol_type = other RNA
gtttgttttccttaccttgg

SEQ ID NO: 672 - RNA, 20 nt, synthetic construct
  misc_feature 1..20: note = Description of Artificial Sequence: Synthetic oligonucleotide
  source 1..20: mol_type = other RNA
gtgcctgtggctttagcaga

SEQ ID NO: 673 - RNA, 20 nt, synthetic construct
  misc_feature 1..20: note = Description of Artificial Sequence: Synthetic oligonucleotide
  source 1..20: mol_type = other RNA
accccctcaagccccacctg

SEQ ID NO: 674 - RNA, 20 nt, synthetic construct
  misc_feature 1..20: note = Description of Artificial Sequence: Synthetic oligonucleotide
  source 1..20: mol_type = other RNA
aactcacccgatggttcttc

SEQ ID NO: 675 - RNA, 20 nt, synthetic construct
  misc_feature 1..20: note = Description of Artificial Sequence: Synthetic oligonucleotide
  source 1..20: mol_type = other RNA
gctttcttcgttaggtgtgg

SEQ ID NO: 676 - RNA, 20 nt, synthetic construct
  misc_feature 1..20: note = Description of Artificial Sequence: Synthetic oligonucleotide
  source 1..20: mol_type = other RNA
caaacaagtaaatatggaac

SEQ ID NO: 677 - RNA, 20 nt, synthetic construct
  misc_feature 1..20: note = Description of Artificial Sequence: Synthetic oligonucleotide
  source 1..20: mol_type = other RNA
gcagcaaccgggacggaggc

SEQ ID NO: 678 - RNA, 20 nt, synthetic construct
  misc_feature 1..20: note = Description of Artificial Sequence: Synthetic oligonucleotide
  source 1..20: mol_type = other RNA
aaagattcagctgacatttg

SEQ ID NO: 679 - RNA, 20 nt, synthetic construct
  misc_feature 1..20: note = Description of Artificial Sequence: Synthetic oligonucleotide
  source 1..20: mol_type = other RNA
tgtttgctgaccacagccat

SEQ ID NO: 680 - RNA, 20 nt, synthetic construct
  misc_feature 1..20: note = Description of Artificial Sequence: Synthetic oligonucleotide
  source 1..20: mol_type = other RNA
aggagaagctgctggtatca

SEQ ID NO: 681 - RNA, 20 nt, synthetic construct
  misc_feature 1..20: note = Description of Artificial Sequence: Synthetic oligonucleotide
  source 1..20: mol_type = other RNA
tgtccgttggcttcataaag

SEQ ID NO: 682 - RNA, 20 nt, synthetic construct
  misc_feature 1..20: note = Description of Artificial Sequence: Synthetic oligonucleotide
  source 1..20: mol_type = other RNA
cttggagccatggtggtaac

SEQ ID NO: 683 - RNA, 20 nt, synthetic construct
  misc_feature 1..20: note = Description of Artificial Sequence: Synthetic oligonucleotide
  source 1..20: mol_type = other RNA
ccgcgggcctcgccccccgg

SEQ ID NO: 684 - RNA, 20 nt, synthetic construct
  misc_feature 1..20: note = Description of Artificial Sequence: Synthetic oligonucleotide
  source 1..20: mol_type = other RNA
ttgcttttagctaaaaagac

SEQ ID NO: 685 - RNA, 20 nt, synthetic construct
  misc_feature 1..20: note = Description of Artificial Sequence: Synthetic oligonucleotide
  source 1..20: mol_type = other RNA
cggcggcccgagatgttatc

SEQ ID NO: 686 - RNA, 20 nt, synthetic construct
  misc_feature 1..20: note = Description of Artificial Sequence: Synthetic oligonucleotide
  source 1..20: mol_type = other RNA
gaatagcagagactccggag

SEQ ID NO: 687 - RNA, 20 nt, synthetic construct
  misc_feature 1..20: note = Description of Artificial Sequence: Synthetic oligonucleotide
  source 1..20: mol_type = other RNA
ttacctgatcccagtgctta

SEQ ID NO: 688 - RNA, 20 nt, synthetic construct
  misc_feature 1..20: note = Description of Artificial Sequence: Synthetic oligonucleotide
  source 1..20: mol_type = other RNA
ctgtggggcacctggaatcg

SEQ ID NO: 689 - RNA, 20 nt, synthetic construct
  misc_feature 1..20: note = Description of Artificial Sequence: Synthetic oligonucleotide
  source 1..20: mol_type = other RNA
ctgtcgggcccagccgaggt

SEQ ID NO: 690 - RNA, 20 nt, synthetic construct
  misc_feature 1..20: note = Description of Artificial Sequence: Synthetic oligonucleotide
  source 1..20: mol_type = other RNA
agggccggcctgaggccctg

SEQ ID NO: 691 - RNA, 20 nt, synthetic construct
  misc_feature 1..20: note = Description of Artificial Sequence: Synthetic oligonucleotide
  source 1..20: mol_type = other RNA
ctgcagatgttttccactca

SEQ ID NO: 692 - RNA, 20 nt, synthetic construct
  misc_feature 1..20: note = Description of Artificial Sequence: Synthetic oligonucleotide
  source 1..20: mol_type = other RNA
gatgttatctgggaagaagg

SEQ ID NO: 693 - RNA, 20 nt, synthetic construct
  misc_feature 1..20: note = Description of Artificial Sequence: Synthetic oligonucleotide
  source 1..20: mol_type = other RNA
gaaggcatttacctttatag

SEQ ID NO: 694 - RNA, 20 nt, synthetic construct
  misc_feature 1..20: note = Description of Artificial Sequence: Synthetic oligonucleotide
  source 1..20: mol_type = other RNA
ctctgctattccagtttcca

SEQ ID NO: 695 - RNA, 20 nt, synthetic construct
  misc_feature 1..20: note = Description of Artificial Sequence: Synthetic oligonucleotide
  source 1..20: mol_type = other RNA
gaagaagatagtgaaaactc

SEQ ID NO: 696 - RNA, 20 nt, synthetic construct
  misc_feature 1..20: note = Description of Artificial Sequence: Synthetic oligonucleotide
  source 1..20: mol_type = other RNA
gccggccctactgtcgtgcc

SEQ ID NO: 697 - RNA, 20 nt, synthetic construct
  misc_feature 1..20: note = Description of Artificial Sequence: Synthetic oligonucleotide
  source 1..20: mol_type = other RNA
ggtggtgttgtgttttgatc

SEQ ID NO: 698 - RNA, 20 nt, synthetic construct
  misc_feature 1..20: note = Description of Artificial Sequence: Synthetic oligonucleotide
  source 1..20: mol_type = other RNA
ctgtattcagtttaatgtct

SEQ ID NO: 699 - RNA, 20 nt, synthetic construct
  misc_feature 1..20: note = Description of Artificial Sequence: Synthetic oligonucleotide
  source 1..20: mol_type = other RNA
gcctgggtctgcgaccccca

SEQ ID NO: 700 - RNA, 20 nt, synthetic construct
  misc_feature 1..20: note = Description of Artificial Sequence: Synthetic oligonucleotide
  source 1..20: mol_type = other RNA
ctagtggcaggagaagctgc

SEQ ID NO: 701 - RNA, 20 nt, synthetic construct
  misc_feature 1..20: note = Description of Artificial Sequence: Synthetic oligonucleotide
  source 1..20: mol_type = other RNA
gaactcggcagtaatatctc

SEQ ID NO: 702 - RNA, 20 nt, synthetic construct
  misc_feature 1..20: note = Description of Artificial Sequence: Synthetic oligonucleotide
  source 1..20: mol_type = other RNA
ctttcttcgttaggtgtgga

SEQ ID NO: 703 - RNA, 20 nt, synthetic construct
  misc_feature 1..20: note = Description of Artificial Sequence: Synthetic oligonucleotide
  source 1..20: mol_type = other RNA
caggaacacctggtgtggcc

SEQ ID NO: 704 - RNA, 20 nt, synthetic construct
  misc_feature 1..20: note = Description of Artificial Sequence: Synthetic oligonucleotide
  source 1..20: mol_type = other RNA
tgcgtcgcatttataaataa

SEQ ID NO: 705 - RNA, 20 nt, synthetic construct
  misc_feature 1..20: note = Description of Artificial Sequence: Synthetic oligonucleotide
  source 1..20: mol_type = other RNA
gctcgacagttacaaagttt

SEQ ID NO: 706 - RNA, 20 nt, synthetic construct
  misc_feature 1..20: note = Description of Artificial Sequence: Synthetic oligonucleotide
  source 1..20: mol_type = other RNA
cgagatgttatctgggaaga

SEQ ID NO: 707 - RNA, 20 nt, synthetic construct
  misc_feature 1..20: note = Description of Artificial Sequence: Synthetic oligonucleotide
  source 1..20: mol_type = other RNA
ggccacctcagacccgttct

SEQ ID NO: 708 - RNA, 20 nt, synthetic construct
  misc_feature 1..20: note = Description of Artificial Sequence: Synthetic oligonucleotide
  source 1..20: mol_type = other RNA
cgatgcctggccattctcaa

SEQ ID NO: 709 - RNA, 20 nt, synthetic construct
  misc_feature 1..20: note = Description of Artificial Sequence: Synthetic oligonucleotide
  source 1..20: mol_type = other RNA
attgaaagaacttcttaata

SEQ ID NO: 710 - RNA, 20 nt, synthetic construct
  misc_feature 1..20: note = Description of Artificial Sequence: Synthetic oligonucleotide
  source 1..20: mol_type = other RNA
taggaggtccttacttggta

SEQ ID NO: 711 - RNA, 20 nt, synthetic construct
  misc_feature 1..20: note = Description of Artificial Sequence: Synthetic oligonucleotide
  source 1..20: mol_type = other RNA
gccatggtggtaacaggtct

SEQ ID NO: 712 - RNA, 20 nt, synthetic construct
  misc_feature 1..20: note = Description of Artificial Sequence: Synthetic oligonucleotide
  source 1..20: mol_type = other RNA
ggaaactatgtagctgatct

SEQ ID NO: 713 - RNA, 20 nt, synthetic construct
  misc_feature 1..20: note = Description of Artificial Sequence: Synthetic oligonucleotide
  source 1..20: mol_type = other RNA
ttcctcaggtggggcttgag

SEQ ID NO: 714 - RNA, 20 nt, synthetic construct
  misc_feature 1..20: note = Description of Artificial Sequence: Synthetic oligonucleotide
  source 1..20: mol_type = other RNA
ctcgattccaggtgccccac

SEQ ID NO: 715 - RNA, 20 nt, synthetic construct
  misc_feature 1..20: note = Description of Artificial Sequence: Synthetic oligonucleotide
  source 1..20: mol_type = other RNA
cggttccgccaggcccccgg

SEQ ID NO: 716 - RNA, 20 nt, synthetic construct
  misc_feature 1..20: note = Description of Artificial Sequence: Synthetic oligonucleotide
  source 1..20: mol_type = other RNA
accaaaaatccctttgagaa

SEQ ID NO: 717 - RNA, 20 nt, synthetic construct
  misc_feature 1..20: note = Description of Artificial Sequence: Synthetic oligonucleotide
  source 1..20: mol_type = other RNA
gttctctgtacccttcccct

SEQ ID NO: 718 - RNA, 20 nt, synthetic construct
  misc_feature 1..20: note = Description of Artificial Sequence: Synthetic oligonucleotide
  source 1..20: mol_type = other RNA
gggcctgtcgggcccagccg

SEQ ID NO: 719 - RNA, 20 nt, synthetic construct
  misc_feature 1..20: note = Description of Artificial Sequence: Synthetic oligonucleotide
  source 1..20: mol_type = other RNA
aaggtaattattataggctc

SEQ ID NO: 720 - RNA, 20 nt, synthetic construct
  misc_feature 1..20: note = Description of Artificial Sequence: Synthetic oligonucleotide
  source 1..20: mol_type = other RNA
ggtcagcaaacaagtaaata

SEQ ID NO: 721 - RNA, 20 nt, synthetic construct
  misc_feature 1..20: note = Description of Artificial Sequence: Synthetic oligonucleotide
  source 1..20: mol_type = other RNA
cgagacaccacagtttcttt

SEQ ID NO: 722 - RNA, 20 nt, synthetic construct
  misc_feature 1..20: note = Description of Artificial Sequence: Synthetic oligonucleotide
  source 1..20: mol_type = other RNA
agaattgcagaccagttttt

SEQ ID NO: 723 - RNA, 20 nt, synthetic construct
  misc_feature 1..20: note = Description of Artificial Sequence: Synthetic oligonucleotide
  source 1..20: mol_type = other RNA
atactcatcttctgagaggt

SEQ ID NO: 724 - RNA, 20 nt, synthetic construct
  misc_feature 1..20: note = Description of Artificial Sequence: Synthetic oligonucleotide
  source 1..20: mol_type = other RNA
tgtgttttgatcgggtgttc

SEQ ID NO: 725 - RNA, 20 nt, synthetic construct
  misc_feature 1..20: note = Description of Artificial Sequence: Synthetic oligonucleotide
  source 1..20: mol_type = other RNA
ggagagagttgagagaggtg

SEQ ID NO: 726 - RNA, 20 nt, synthetic construct
  misc_feature 1..20: note = Description of Artificial Sequence: Synthetic oligonucleotide
  source 1..20: mol_type = other RNA
gcttcagcacacccagggga

SEQ ID NO: 727 - RNA, 20 nt, synthetic construct
  misc_feature 1..20: note = Description of Artificial Sequence: Synthetic oligonucleotide
  source 1..20: mol_type = other RNA
gtaggaggtccttacttggt

SEQ ID NO: 728 - RNA, 20 nt, synthetic construct
  misc_feature 1..20: note = Description of Artificial Sequence: Synthetic oligonucleotide
  source 1..20: mol_type = other RNA
gtcggaccagccggcgcaag

SEQ ID NO: 729 - RNA, 20 nt, synthetic construct
  misc_feature 1..20: note = Description of Artificial Sequence: Synthetic oligonucleotide
  source 1..20: mol_type = other RNA
ttggcagtacgactgccagc

SEQ ID NO: 730 - RNA, 20 nt, synthetic construct
  misc_feature 1..20: note = Description of Artificial Sequence: Synthetic oligonucleotide
  source 1..20: mol_type = other RNA
agaagaaaaacttcaggagt

SEQ ID NO: 731 - RNA, 20 nt, synthetic construct
  misc_feature 1..20: note = Description of Artificial Sequence: Synthetic oligonucleotide
  source 1..20: mol_type = other RNA
gctggccctgggacagcagg

SEQ ID NO: 732 - RNA, 20 nt, synthetic construct
  misc_feature 1..20: note = Description of Artificial Sequence: Synthetic oligonucleotide
  source 1..20: mol_type = other RNA
cagagagatggatgaaagct

SEQ ID NO: 733 - RNA, 20 nt, synthetic construct
  misc_feature 1..20: note = Description of Artificial Sequence: Synthetic oligonucleotide
  source 1..20: mol_type = other RNA
ttaagggagagagttgagag

SEQ ID NO: 734 - RNA, 20 nt, synthetic construct
  misc_feature 1..20: note = Description of Artificial Sequence: Synthetic oligonucleotide
  source 1..20: mol_type = other RNA
gggggcctggcggaaccgcc

SEQ ID NO: 735 - RNA, 20 nt, synthetic construct
  misc_feature 1..20: note = Description of Artificial Sequence: Synthetic oligonucleotide
  source 1..20: mol_type = other RNA
tacctgatcccagtgcttaa

SEQ ID NO: 736 - RNA, 20 nt, synthetic construct
  misc_feature 1..20: note = Description of Artificial Sequence: Synthetic oligonucleotide
  source 1..20: mol_type = other RNA
tgggaagaaggcggcagccg

SEQ ID NO: 737 - RNA, 20 nt, synthetic construct
  misc_feature 1..20: note = Description of Artificial Sequence: Synthetic oligonucleotide
  source 1..20: mol_type = other RNA
tgtcacacttttggaagcca

SEQ ID NO: 738 - RNA, 20 nt, synthetic construct
  misc_feature 1..20: note = Description of Artificial Sequence: Synthetic oligonucleotide
  source 1..20: mol_type = other RNA
gctgggcccgacaggcccgc

SEQ ID NO: 739 - RNA, 20 nt, synthetic construct
  misc_feature 1..20: note = Description of Artificial Sequence: Synthetic oligonucleotide
  source 1..20: mol_type = other RNA
ctcttctggaacctctataa

SEQ ID NO: 740 - RNA, 20 nt, synthetic construct
  misc_feature 1..20: note = Description of Artificial Sequence: Synthetic oligonucleotide
  source 1..20: mol_type = other RNA
actgataatatctggaaaac

SEQ ID NO: 741 - RNA, 20 nt, synthetic construct
  misc_feature 1..20: note = Description of Artificial Sequence: Synthetic oligonucleotide
  source 1..20: mol_type = other RNA
cggaggggcgtcggaccagc

SEQ ID NO: 742 - RNA, 20 nt, synthetic construct
  misc_feature 1..20: note = Description of Artificial Sequence: Synthetic oligonucleotide
  source 1..20: mol_type = other RNA
ctttgagaatggccaggcat

SEQ ID NO: 743 - RNA, 20 nt, synthetic construct
  misc_feature 1..20: note = Description of Artificial Sequence: Synthetic oligonucleotide
  source 1..20: mol_type = other RNA
gcgcagcccgcgggcctgtc

SEQ ID NO: 744 - RNA, 20 nt, synthetic construct
  misc_feature 1..20: note = Description of Artificial Sequence: Synthetic oligonucleotide
  source 1..20: mol_type = other RNA
attccacgactcttctttgc

SEQ ID NO: 745 - RNA, 20 nt, synthetic construct
  misc_feature 1..20: note = Description of Artificial Sequence: Synthetic oligonucleotide
  source 1..20: mol_type = other RNA
atgcttctttgtattgctga

SEQ ID NO: 746 - RNA, 20 nt, synthetic construct
  misc_feature 1..20: note = Description of Artificial Sequence: Synthetic oligonucleotide
  source 1..20: mol_type = other RNA
aagaattgcagaccagtttt

SEQ ID NO: 747 - RNA, 20 nt, synthetic construct
  misc_feature 1..20: note = Description of Artificial Sequence: Synthetic oligonucleotide
  source 1..20: mol_type = other RNA
ctgtgcaggaacacctggtg

SEQ ID NO: 748 - RNA, 20 nt, synthetic construct
  misc_feature 1..20: note = Description of Artificial Sequence: Synthetic oligonucleotide
  source 1..20: mol_type = other RNA
ggaataagagccccgagccc

SEQ ID NO: 749 - RNA, 20 nt, synthetic construct
  misc_feature 1..20: note = Description of Artificial Sequence: Synthetic oligonucleotide
  source 1..20: mol_type = other RNA
ctgcctcgccaggccacacc

SEQ ID NO: 750 - RNA, 20 nt, synthetic construct
  misc_feature 1..20: note = Description of Artificial Sequence: Synthetic oligonucleotide
  source 1..20: mol_type = other RNA
ccgggacggaggctggccct

SEQ ID NO: 751 - RNA, 20 nt, synthetic construct
  misc_feature 1..20: note = Description of Artificial Sequence: Synthetic oligonucleotide
  source 1..20: mol_type = other RNA
cagagactccggaggggcgt

SEQ ID NO: 752 - RNA, 20 nt, synthetic construct
  misc_feature 1..20: note = Description of Artificial Sequence: Synthetic oligonucleotide
  source 1..20: mol_type = other RNA
cggagccgcctgctgtccca

SEQ ID NO: 753 - RNA, 20 nt, synthetic construct
  misc_feature 1..20: note = Description of Artificial Sequence: Synthetic oligonucleotide
  source 1..20: mol_type = other RNA
gtgcatggtgctctgctgag

SEQ ID NO: 754 - RNA, 20 nt, synthetic construct
  misc_feature 1..20: note = Description of Artificial Sequence: Synthetic oligonucleotide
  source 1..20: mol_type = other RNA
ctgctgcttcagcacaccca

SEQ ID NO: 755 - RNA, 20 nt, synthetic construct
  misc_feature 1..20: note = Description of Artificial Sequence: Synthetic oligonucleotide
  source 1..20: mol_type = other RNA
acaggaaaggtaattattat

SEQ ID NO: 756 - RNA, 20 nt, synthetic construct
  misc_feature 1..20: note = Description of Artificial Sequence: Synthetic oligonucleotide
  source 1..20: mol_type = other RNA
cagccggcgcaagcgggcga

SEQ ID NO: 757 - RNA, 20 nt, synthetic construct
  misc_feature 1..20: note = Description of Artificial Sequence: Synthetic oligonucleotide
  source 1..20: mol_type = other RNA
tgcatggtgctctgctgagt

SEQ ID NO: 758 - RNA, 20 nt, synthetic construct
  misc_feature 1..20: note = Description of Artificial Sequence: Synthetic oligonucleotide
  source 1..20: mol_type = other RNA
gctgctgcttcagcacaccc

SEQ ID NO: 759 - RNA, 20 nt, synthetic construct
  misc_feature 1..20: note = Description of Artificial Sequence: Synthetic oligonucleotide
  source 1..20: mol_type = other RNA
tgtcgggcccagccgaggtc

SEQ ID NO: 760 - RNA, 20 nt, synthetic construct
  misc_feature 1..20: note = Description of Artificial Sequence: Synthetic oligonucleotide
  source 1..20: mol_type = other RNA
cgtgctgatccctgggctcg

SEQ ID NO: 761 - RNA, 20 nt, synthetic construct
  misc_feature 1..20: note = Description of Artificial Sequence: Synthetic oligonucleotide
  source 1..20: mol_type = other RNA
gcggttccgccaggcccccg

SEQ ID NO: 762 - RNA, 20 nt, synthetic construct
  misc_feature 1..20: note = Description of Artificial Sequence: Synthetic oligonucleotide
  source 1..20: mol_type = other RNA
gcagtccaaaggatgggatt

SEQ ID NO: 763 - RNA, 20 nt, synthetic construct
  misc_feature 1..20: note = Description of Artificial Sequence: Synthetic oligonucleotide
  source 1..20: mol_type = other RNA
acacactacttactgttata

SEQ ID NO: 764 - RNA, 20 nt, synthetic construct
  misc_feature 1..20: note = Description of Artificial Sequence: Synthetic oligonucleotide
  source 1..20: mol_type = other RNA
taagcctgtgtcccttggcc

SEQ ID NO: 765 - RNA, 20 nt, synthetic construct
  misc_feature 1..20: note = Description of Artificial Sequence: Synthetic oligonucleotide
  source 1..20: mol_type = other RNA
ggcccagccgaggtcgggcc

SEQ ID NO: 766 - RNA, 20 nt, synthetic construct
  misc_feature 1..20: note = Description of Artificial Sequence: Synthetic oligonucleotide
  source 1..20: mol_type = other RNA
acacctggtgtggcctggcg

SEQ ID NO: 767 - RNA, 20 nt, synthetic construct
  misc_feature 1..20: note = Description of Artificial Sequence: Synthetic oligonucleotide
  source 1..20: mol_type = other RNA
gatccaagtgtcaatttgtt

SEQ ID NO: 768 - RNA, 20 nt, synthetic construct
  misc_feature 1..20: note = Description of Artificial Sequence: Synthetic oligonucleotide
  source 1..20: mol_type = other RNA
tcaaatgtcagctgaatctt

SEQ ID NO: 769 - RNA, 20 nt, synthetic construct
  misc_feature 1..20: note = Description of Artificial Sequence: Synthetic oligonucleotide
  source 1..20: mol_type = other RNA
gggcccagccgaggtcgggc

SEQ ID NO: 770 - RNA, 20 nt, synthetic construct
  misc_feature 1..20: note = Description of Artificial Sequence: Synthetic oligonucleotide
  source 1..20: mol_type = other RNA
cgacaggcccgcgggctgcg

SEQ ID NO: 771 - RNA, 20 nt, synthetic construct
  misc_feature 1..20: note = Description of Artificial Sequence: Synthetic oligonucleotide
  source 1..20: mol_type = other RNA
ggtcatgaggaagtcggctc

SEQ ID NO: 772 - RNA, 20 nt, synthetic construct
  misc_feature 1..20: note = Description of Artificial Sequence: Synthetic oligonucleotide
  source 1..20: mol_type = other RNA
tccgcgggcctcgccccccg

SEQ ID NO: 773 - RNA, 20 nt, synthetic construct
  misc_feature 1..20: note = Description of Artificial Sequence: Synthetic oligonucleotide
  source 1..20: mol_type = other RNA
ctcgttggcgtgctgatccc

SEQ ID NO: 774 - RNA, 20 nt, synthetic construct
  misc_feature 1..20: note = Description of Artificial Sequence: Synthetic oligonucleotide
  source 1..20: mol_type = other RNA
acgagacaccacagtttctt

SEQ ID NO: 775 - RNA, 20 nt, synthetic construct
  misc_feature 1..20: note = Description of Artificial Sequence: Synthetic oligonucleotide
  source 1..20: mol_type = other RNA
tgtgtcccttggccaggcat

SEQ ID NO: 776 - RNA, 20 nt, synthetic construct
  misc_feature 1..20: note = Description of Artificial Sequence: Synthetic oligonucleotide
  source 1..20: mol_type = other RNA
cggctgcagcggcagcaacc

SEQ ID NO: 777 - RNA, 20 nt, synthetic construct
  misc_feature 1..20: note = Description of Artificial Sequence: Synthetic oligonucleotide
  source 1..20: mol_type = other RNA
gaggaagagctcacccctgc

SEQ ID NO: 778 - RNA, 20 nt, synthetic construct
  misc_feature 1..20: note = Description of Artificial Sequence: Synthetic oligonucleotide
  source 1..20: mol_type = other RNA
agttctctgtacccttcccc

SEQ ID NO: 779 - RNA, 20 nt, synthetic construct
  misc_feature 1..20: note = Description of Artificial Sequence: Synthetic oligonucleotide
  source 1..20: mol_type = other RNA
ccgcggaggctctttcttgc

SEQ ID NO: 780 - RNA, 20 nt, synthetic construct
  misc_feature 1..20: note = Description of Artificial Sequence: Synthetic oligonucleotide
  source 1..20: mol_type = other RNA
gagaaatgccaaagcagaga

SEQ ID NO: 781 - RNA, 20 nt, synthetic construct
  misc_feature 1..20: note = Description of Artificial Sequence: Synthetic oligonucleotide
  source 1..20: mol_type = other RNA
cccccggcccgacctcggct

SEQ ID NO: 782 - RNA, 20 nt, synthetic construct
  misc_feature 1..20: note = Description of Artificial Sequence: Synthetic oligonucleotide
  source 1..20: mol_type = other RNA
gaagaaggcggcagccgcgg

SEQ ID NO: 783 - RNA, 20 nt, synthetic construct
  misc_feature 1..20: note = Description of Artificial Sequence: Synthetic oligonucleotide
  source 1..20: mol_type = other RNA
ggctgggcccgacaggcccg

SEQ ID NO: 784 - RNA, 20 nt, synthetic construct
  misc_feature 1..20: note = Description of Artificial Sequence: Synthetic oligonucleotide
  source 1..20: mol_type = other RNA
tctgcgacccccatggaaac

SEQ ID NO: 785 - RNA, 20 nt, synthetic construct
  misc_feature 1..20: note = Description of Artificial Sequence: Synthetic oligonucleotide
  source 1..20: mol_type = other RNA
gcctgaggccctgcggaccc

SEQ ID NO: 786 - RNA, 20 nt, synthetic construct
  misc_feature 1..20: note = Description of Artificial Sequence: Synthetic oligonucleotide
  source 1..20: mol_type = other RNA
aggtggtgttgtgttttgat

SEQ ID NO: 787 - RNA, 20 nt, synthetic construct
  misc_feature 1..20: note = Description of Artificial Sequence: Synthetic oligonucleotide
  source 1..20: mol_type = other RNA
ttcattttcttcctcaggtg

SEQ ID NO: 788 - RNA, 20 nt, synthetic construct
  misc_feature 1..20: note = Description of Artificial Sequence: Synthetic oligonucleotide
  source 1..20: mol_type = other RNA
ttaccttcgcccgcttgcgc

SEQ ID NO: 789 - RNA, 20 nt, synthetic construct
  misc_feature 1..20: note = Description of Artificial Sequence: Synthetic oligonucleotide
  source 1..20: mol_type = other RNA
gcccagccgaggtcgggccg

SEQ ID NO: 790 - RNA, 20 nt, synthetic construct
  misc_feature 1..20: note = Description of Artificial Sequence: Synthetic oligonucleotide
  source 1..20: mol_type = other RNA
ccggggggcgaggcccgcgg

SEQ ID NO: 791 - RNA, 20 nt, synthetic construct
  misc_feature 1..20: note = Description of Artificial Sequence: Synthetic oligonucleotide
  source 1..20: mol_type = other RNA
cccagggccagcctccgtcc

SEQ ID NO: 792 - RNA, 20 nt, synthetic construct
  misc_feature 1..20: note = Description of Artificial Sequence: Synthetic oligonucleotide
  source 1..20: mol_type = other RNA
tcttcctcaggtggggcttg

SEQ ID NO: 793 - RNA, 20 nt, synthetic construct
  misc_feature 1..20: note = Description of Artificial Sequence: Synthetic oligonucleotide
  source 1..20: mol_type = other RNA
cgacctcggctgggcccgac

SEQ ID NO: 794 - RNA, 20 nt, synthetic construct
  misc_feature 1..20: note = Description of Artificial Sequence: Synthetic oligonucleotide
  source 1..20: mol_type = other RNA
cttcttcccagataacatct

SEQ ID NO: 795 - RNA, 20 nt, synthetic construct
  misc_feature 1..20: note = Description of Artificial Sequence: Synthetic oligonucleotide
  source 1..20: mol_type = other RNA
tatgttgctgcaggatcatc

SEQ ID NO: 796 - RNA, 20 nt, synthetic construct
  misc_feature 1..20: note = Description of Artificial Sequence: Synthetic oligonucleotide
  source 1..20: mol_type = other RNA
ctcgccccccgggggcctgg

SEQ ID NO: 797 - RNA, 20 nt, synthetic construct
  misc_feature 1..20: note = Description of Artificial Sequence: Synthetic oligonucleotide
  source 1..20: mol_type = other RNA
gccattctcaaagggatttt

SEQ ID NO: 798 - RNA, 20 nt, synthetic construct
  misc_feature 1..20: note = Description of Artificial Sequence: Synthetic oligonucleotide
  source 1..20: mol_type = other RNA
ggcgtgctgatccctgggct

SEQ ID NO: 799 - RNA, 20 nt, synthetic construct
  misc_feature 1..20: note = Description of Artificial Sequence: Synthetic oligonucleotide
  source 1..20: mol_type = other RNA
gagacagacaaatacttgat

SEQ ID NO: 800 - RNA, 20 nt, synthetic construct
  misc_feature 1..20: note = Description of Artificial Sequence: Synthetic oligonucleotide
  source 1..20: mol_type = other RNA
gggtccgcagggcctcaggc

SEQ ID NO: 801 - RNA, 20 nt, synthetic construct
  misc_feature 1..20: note = Description of Artificial Sequence: Synthetic oligonucleotide
  source 1..20: mol_type = other RNA
actcctggcccctcgattcc

SEQ ID NO: 802 - RNA, 20 nt, synthetic construct
  misc_feature 1..20: note = Description of Artificial Sequence: Synthetic oligonucleotide
  source 1..20: mol_type = other RNA
cgcgcagcccgcgggcctgt

SEQ ID NO: 803 - RNA, 20 nt, synthetic construct
  misc_feature 1..20: note = Description of Artificial Sequence: Synthetic oligonucleotide
  source 1..20: mol_type = other RNA
ctttcattttcttcctcagg

SEQ ID NO: 804 - RNA, 20 nt, synthetic construct
  misc_feature 1..20: note = Description of Artificial Sequence: Synthetic oligonucleotide
  source 1..20: mol_type = other RNA
gtgcgctcccccaccgcccc

SEQ ID NO: 805 - RNA, 20 nt, synthetic construct
  misc_feature 1..20: note = Description of Artificial Sequence: Synthetic oligonucleotide
  source 1..20: mol_type = other RNA
gaggctggccctgggacagc

SEQ ID NO: 806 - RNA, 20 nt, synthetic construct
  misc_feature 1..20: note = Description of Artificial Sequence: Synthetic oligonucleotide
  source 1..20: mol_type = other RNA
tttcattttcttcctcaggt

SEQ ID NO: 807 - RNA, 20 nt, synthetic construct
  misc_feature 1..20: note = Description of Artificial Sequence: Synthetic oligonucleotide
  source 1..20: mol_type = other RNA
cggctggtccgacgcccctc

SEQ ID NO: 808 - RNA, 20 nt, synthetic construct
  misc_feature 1..20: note = Description of Artificial Sequence: Synthetic oligonucleotide
  source 1..20: mol_type = other RNA
atcgaggggccaggagtgat

SEQ ID NO: 809 - RNA, 20 nt, synthetic construct
  misc_feature 1..20: note = Description of Artificial Sequence: Synthetic oligonucleotide
  source 1..20: mol_type = other RNA
gaggtggccgcgcagcccgc

SEQ ID NO: 810 - RNA, 20 nt, synthetic construct
  misc_feature 1..20: note = Description of Artificial Sequence: Synthetic oligonucleotide
  source 1..20: mol_type = other RNA
cgggggcctggcggaaccgc

SEQ ID NO: 811 - RNA, 20 nt, synthetic construct
  misc_feature 1..20: note = Description of Artificial Sequence: Synthetic oligonucleotide
  source 1..20: mol_type = other RNA
cgctgcagccgccgccgccg

SEQ ID NO: 812 - RNA, 20 nt, synthetic construct
  misc_feature 1..20: note = Description of Artificial Sequence: Synthetic oligonucleotide
  source 1..20: mol_type = other RNA
cttctcacctgtggggcacc

SEQ ID NO: 813 - RNA, 20 nt, synthetic construct
  misc_feature 1..20: note = Description of Artificial Sequence: Synthetic oligonucleotide
  source 1..20: mol_type = other RNA
aggtcgggccgggggcggtg

SEQ ID NO: 814 - RNA, 20 nt, synthetic construct
  misc_feature 1..20: note = Description of Artificial Sequence: Synthetic oligonucleotide
  source 1..20: mol_type = other RNA
agagcaccatgcactgtggc

SEQ ID NO: 815 - RNA, 20 nt, synthetic construct
  misc_feature 1..20: note = Description of Artificial Sequence: Synthetic oligonucleotide
  source 1..20: mol_type = other RNA
gactgctgtgcaggaacacc

SEQ ID NO: 816 - RNA, 20 nt, synthetic construct
  misc_feature 1..20: note = Description of Artificial Sequence: Synthetic oligonucleotide
  source 1..20: mol_type = other RNA
aggctctggggtctcaggct

SEQ ID NO: 817 - RNA, 20 nt, synthetic construct
  misc_feature 1..20: note = Description of Artificial Sequence: Synthetic oligonucleotide
  source 1..20: mol_type = other RNA
cccagccgaggtcgggccgg

SEQ ID NO: 818 - RNA, 20 nt, synthetic construct
  misc_feature 1..20: note = Description of Artificial Sequence: Synthetic oligonucleotide
  source 1..20: mol_type = other RNA
tgaggtggccgcgcagcccg

SEQ ID NO: 819 - RNA, 20 nt, synthetic construct
  misc_feature 1..20: note = Description of Artificial Sequence: Synthetic oligonucleotide
  source 1..20: mol_type = other RNA
gcgtgctgatccctgggctc

SEQ ID NO: 820 - RNA, 20 nt, synthetic construct
  misc_feature 1..20: note = Description of Artificial Sequence: Synthetic oligonucleotide
  source 1..20: mol_type = other RNA
gcacctggaatcgaggggcc

SEQ ID NO: 821 - RNA, 20 nt, synthetic construct
  misc_feature 1..20: note = Description of Artificial Sequence: Synthetic oligonucleotide
  source 1..20: mol_type = other RNA
cttcgcccgcttgcgccggc

SEQ ID NO: 822 - RNA, 20 nt, synthetic construct
  misc_feature 1..20: note = Description of Artificial Sequence: Synthetic oligonucleotide
  source 1..20: mol_type = other RNA
tcctaaagagaaagatgaaa

SEQ ID NO: 823 - RNA, 20 nt, synthetic construct
  misc_feature 1..20: note = Description of Artificial Sequence: Synthetic oligonucleotide
  source 1..20: mol_type = other RNA
atgcttggggactgctgtgc

SEQ ID NO: 824 - RNA, 20 nt, synthetic construct
  misc_feature 1..20: note = Description of Artificial Sequence: Synthetic oligonucleotide
  source 1..20: mol_type = other RNA
aatgaaaagaaaaaccttct

SEQ ID NO: 825 - RNA, 20 nt, synthetic construct
  misc_feature 1..20: note = Description of Artificial Sequence: Synthetic oligonucleotide
  source 1..20: mol_type = other RNA
gcggaaccgccggggtccgc

SEQ ID NO: 826 - RNA, 20 nt, synthetic construct
  misc_feature 1..20: note = Description of Artificial Sequence: Synthetic oligonucleotide
  source 1..20: mol_type = other RNA
gaggtcgggccgggggcggt

SEQ ID NO: 827 - RNA, 20 nt, synthetic construct
  misc_feature 1..20: note = Description of Artificial Sequence: Synthetic oligonucleotide
  source 1..20: mol_type = other RNA
attataggctctggggtctc

SEQ ID NO: 828 - RNA, 20 nt, synthetic construct
  misc_feature 1..20: note = Description of Artificial Sequence: Synthetic oligonucleotide
  source 1..20: mol_type = other RNA
tcactttcattttcttcctc

SEQ ID NO: 829 - RNA, 20 nt, synthetic construct
  misc_feature 1..20: note = Description of Artificial Sequence: Synthetic oligonucleotide
  source 1..20: mol_type = other RNA
tcggagccgcctgctgtccc

SEQ ID NO: 830 - RNA, 20 nt, synthetic construct
  misc_feature 1..20: note = Description of Artificial Sequence: Synthetic oligonucleotide
  source 1..20: mol_type = other RNA
agccgaggtcgggccggggg

SEQ ID NO: 831 - RNA, 20 nt, synthetic construct
  misc_feature 1..20: note = Description of Artificial Sequence: Synthetic oligonucleotide
  source 1..20: mol_type = other RNA
aaagctagaagaaaaacttc

SEQ ID NO: 832 - RNA, 20 nt, synthetic construct
  misc_feature 1..20: note = Description of Artificial Sequence: Synthetic oligonucleotide
  source 1..20: mol_type = other RNA
tcctcaggtggggcttgagg

SEQ ID NO: 833 - RNA, 20 nt, synthetic construct
  misc_feature 1..20: note = Description of Artificial Sequence: Synthetic oligonucleotide
  source 1..20: mol_type = other RNA
tgcatctgtctcacatgctt

SEQ ID NO: 834 - RNA, 20 nt, synthetic construct
  misc_feature 1..20: note = Description of Artificial Sequence: Synthetic oligonucleotide
  source 1..20: mol_type = other RNA
ggcggttccgccaggccccc

SEQ ID NO: 835 - RNA, 20 nt, synthetic construct
  misc_feature 1..20: note = Description of Artificial Sequence: Synthetic oligonucleotide
  source 1..20: mol_type = other RNA
cggcggttccgccaggcccc

SEQ ID NO: 836 - RNA, 20 nt, synthetic construct
  misc_feature 1..20: note = Description of Artificial Sequence: Synthetic oligonucleotide
  source 1..20: mol_type = other RNA
accgggacggaggctggccc

SEQ ID NO: 837 - RNA, 20 nt, synthetic construct
  misc_feature 1..20: note = Description of Artificial Sequence: Synthetic oligonucleotide
  source 1..20: mol_type = other RNA
caccgcccccggcccgacct

SEQ ID NO: 838 - RNA, 20 nt, synthetic construct
  misc_feature 1..20: note = Description of Artificial Sequence: Synthetic oligonucleotide
  source 1..20: mol_type = other RNA
ggggtgagctcttcctcttc

SEQ ID NO: 839 - RNA, 20 nt, synthetic construct
  misc_feature 1..20: note = Description of Artificial Sequence: Synthetic oligonucleotide
  source 1..20: mol_type = other RNA
cgccaggcccccggggggcg

SEQ ID NO: 840 - RNA, 20 nt, synthetic construct
  misc_feature 1..20: note = Description of Artificial Sequence: Synthetic oligonucleotide
  source 1..20: mol_type = other RNA
accatttcatctttctcttt

SEQ ID NO: 841 - RNA, 20 nt, synthetic construct
  misc_feature 1..20: note = Description of Artificial Sequence: Synthetic oligonucleotide
  source 1..20: mol_type = other RNA
ggcctcgccccccgggggcc

SEQ ID NO: 842 - RNA, 20 nt, synthetic construct
  misc_feature 1..20: note = Description of Artificial Sequence: Synthetic oligonucleotide
  source 1..20: mol_type = other RNA
tggggcttgagggggtggtg

SEQ ID NO: 843 - RNA, 20 nt, synthetic construct
  misc_feature 1..20: note = Description of Artificial Sequence: Synthetic oligonucleotide
  source 1..20: mol_type = other RNA
gccggggtccgcagggcctc

SEQ ID NO: 844 - RNA, 20 nt, synthetic construct
  misc_feature 1..20: note = Description of Artificial Sequence: Synthetic oligonucleotide
  source 1..20: mol_type = other RNA
gcccccggcccgacctcggc

SEQ ID NO: 845 - RNA, 20 nt, synthetic construct
  misc_feature 1..20: note = Description of Artificial Sequence: Synthetic oligonucleotide
  source 1..20: mol_type = other RNA
cttcttttccttctctgctt

SEQ ID NO: 846 - RNA, 20 nt, synthetic construct
  misc_feature 1..20: note = Description of Artificial Sequence: Synthetic oligonucleotide
  source 1..20: mol_type = other RNA
cctccgcgggcctcgccccc

SEQ ID NO: 847 - RNA, 20 nt, synthetic construct
  misc_feature 1..20: note = Description of Artificial Sequence: Synthetic oligonucleotide
  source 1..20: mol_type = other RNA
ggtcgggccgggggcggtgg

SEQ ID NO: 848 - RNA, 20 nt, synthetic construct
  misc_feature 1..20: note = Description of Artificial Sequence: Synthetic oligonucleotide
  source 1..20: mol_type = other RNA
ctccgcgggcctcgcccccc

SEQ ID NO: 849 - RNA, 20 nt, synthetic construct
  misc_feature 1..20: note = Description of Artificial Sequence: Synthetic oligonucleotide
  source 1..20: mol_type = other RNA
tggaatggatgtcacacttt

SEQ ID NO: 850 - RNA, 20 nt, synthetic construct
  misc_feature 1..20: note = Description of Artificial Sequence: Synthetic oligonucleotide
  source 1..20: mol_type = other RNA
cttcctcaggtggggcttga

SEQ ID NO: 851 - RNA, 20 nt, synthetic construct
  misc_feature 1..20: note = Description of Artificial Sequence: Synthetic oligonucleotide
  source 1..20: mol_type = other RNA
gtggggcttgagggggtggt

SEQ ID NO: 852 - RNA, 20 nt, synthetic construct
  misc_feature 1..20: note = Description of Artificial Sequence: Synthetic oligonucleotide
  source 1..20: mol_type = other RNA
gcggctgcagcggcagcaac

SEQ ID NO: 853 - RNA, 20 nt, synthetic construct
  misc_feature 1..20: note = Description of Artificial Sequence: Synthetic oligonucleotide
  source 1..20: mol_type = other RNA
cccccggggggcgaggcccg

SEQ ID NO: 854 - RNA, 20 nt, synthetic construct
  misc_feature 1..20: note = Description of Artificial Sequence: Synthetic oligonucleotide
  source 1..20: mol_type = other RNA
taatgaaaagaaaaaccttc

SEQ ID NO: 855 - RNA, 20 nt, synthetic construct
  misc_feature 1..20: note = Description of Artificial Sequence: Synthetic oligonucleotide
  source 1..20: mol_type = other RNA
cgcggcggcggcggctgcag

SEQ ID NO: 856 - RNA, 20 nt, synthetic construct
  misc_feature 1..20: note = Description of Artificial Sequence: Synthetic oligonucleotide
  source 1..20: mol_type = other RNA
tcaggtggggcttgaggggg

SEQ ID NO: 857 - RNA, 20 nt, synthetic construct
  misc_feature 1..20: note = Description of Artificial Sequence: Synthetic oligonucleotide
  source 1..20: mol_type = other RNA
ggtggggcttgagggggtgg

SEQ ID NO: 858 - RNA, 20 nt, synthetic construct
  misc_feature 1..20: note = Description of Artificial Sequence: Synthetic oligonucleotide
  source 1..20: mol_type = other RNA
tggaaatgactatgatttaa

SEQ ID NO: 859 - RNA, 20 nt, synthetic construct
  misc_feature 1..20: note = Description of Artificial Sequence: Synthetic oligonucleotide
  source 1..20: mol_type = other RNA
ggggcttgagggggtggtgg

SEQ ID NO: 860 - RNA, 20 nt, synthetic construct
  misc_feature 1..20: note = Description of Artificial Sequence: Synthetic oligonucleotide
  source 1..20: mol_type = other RNA
cgaggtcgggccgggggcgg

SEQ ID NO: 861 - RNA, 20 nt, synthetic construct
  misc_feature 1..20: note = Description of Artificial Sequence: Synthetic oligonucleotide
  source 1..20: mol_type = other RNA
ggcggcagccgcggcggcgg

SEQ ID NO: 862 - RNA, 20 nt, synthetic construct
  misc_feature 1..20: note = Description of Artificial Sequence: Synthetic oligonucleotide
  source 1..20: mol_type = other RNA
gaaggcggcagccgcggcgg

SEQ ID NO: 863 - skipped

SEQ ID NO: 864 - protein, 7 aa, Simian virus 40
PKKKRKV

SEQ ID NO: 865 - protein, 6 aa, synthetic construct
  REGION 1..6: note = Description of Artificial Sequence: Synthetic 6xHis tag
HHHHHH

SEQ ID NO: 866 - protein, 8 aa, synthetic construct
  REGION 1..8: note = Description of Artificial Sequence: Synthetic 8xHis tag
HHHHHHHH

SEQ ID NO: 867 - RNA, 42 nt, synthetic construct
  misc_feature 1..42: note = Description of Artificial Sequence: Synthetic oligonucleotide
  misc_difference 1..20: note = a, c, u, g, unknown or other
  source 1..42: mol_type = other RNA
nnnnnnnnnnnnnnnnnnnngttttagagctatgctgttttg

SEQ ID NO: 868 - RNA, 86 nt, synthetic construct
  misc_feature 1..86: note = Description of Artificial Sequence: Synthetic oligonucleotide
  misc_difference 80..86: note = May or may not be present
  source 1..86: mol_type = other RNA
aacttaccaaggaacagcatagcaagttaaaataaggctagtccgttatcaacttgaaaaagtggcaccgagtcggtgcttttttt

SEQ ID NO: 869 - RNA, 74 nt, synthetic construct
  misc_feature 1..74: note = Description of Artificial Sequence: Synthetic oligonucleotide
  misc_difference 68..74: note = May or may not be present
  source 1..74: mol_type = other RNA
aacagcatagcaagttaaaataaggctagtccgttatcaacttgaaaaagtggcaccgagtcggtgcttttttt

SEQ ID NO: 870 - RNA, 102 nt, synthetic construct
  misc_feature 1..102: note = Description of Artificial Sequence: Synthetic polynucleotide
  misc_difference 1..19: note = a, c, u, g, unknown or other
  misc_difference 96..102: note = May or may not be present
  source 1..102: mol_type = other RNA
nnnnnnnnnnnnnnnnnnngttttagagctagaaatagcaagttaaaataaggctagtccgttatcaacttgaaaaagtggcaccgagtcggtgcttttttt

SEQ ID NO: 871 - protein, 18 aa, synthetic construct
  REGION 1..18: note = Description of Artificial Sequence: Synthetic peptide
GSTSGSGKPGSGEGSTKG

SEQ ID NO: 872 - protein, 242 aa, synthetic construct
  REGION 1..242: note = Description of Artificial Sequence: Synthetic polypeptide
EIVMTQSPATLSLSPGERATLSCRASQDISKYLNWYQQKPGQAPRLLIYHTSRLHSGIPARFSGSGSGTDYTLTISSLQPEDFAVYFCQQGNTLPYTFGQGTKLEIKGGGGSGGGGSGGGGSQVQLQESGPGLVKPSETLSLTCTVSGVSLPDYGVSWIRQPPGKGLEWIGVIWGSETTYYSSSLKSRVTISKDNSKNQVSLKLSSVTAADTAVYYCAKHYYYGGSYAMDYWGQGTLVTVSS

SEQ ID NO: 873 - protein, 242 aa, synthetic construct
  REGION 1..242: note = Description of Artificial Sequence: Synthetic polypeptide
EIVMTQSPATLSLSPGERATLSCRASQDISKYLNWYQQKPGQAPRLLIYHTSRLHSGIPARFSGSGSGTDYTLTISSLQPEDFAVYFCQQGNTLPYTFGQGTKLEIKGGGGSGGGGSGGGGSQVQLQESGPGLVKPSETLSLTCTVSGVSLPDYGVSWIRQPPGKGLEWIGVIWGSETTYYQSSLKSRVTISKDNSKNQVSLKLSSVTAADTAVYYCAKHYYYGGSYAMDYWGQGTLVTVSS

SEQ ID NO: 874 - protein, 242 aa, synthetic construct
  REGION 1..242: note = Description of Artificial Sequence: Synthetic polypeptide
QVQLQESGPGLVKPSETLSLTCTVSGVSLPDYGVSWIRQPPGKGLEWIGVIWGSETTYYSSSLKSRVTISKDNSKNQVSLKLSSVTAADTAVYYCAKHYYYGGSYAMDYWGQGTLVTVSSGGGGSGGGGSGGGGSEIVMTQSPATLSLSPGERATLSCRASQDISKYLNWYQQKPGQAPRLLIYHTSRLHSGIPARFSGSGSGTDYTLTISSLQPEDFAVYFCQQGNTLPYTFGQGTKLEIK

SEQ ID NO: 875 - protein, 242 aa, synthetic construct
  REGION 1..242: note = Description of Artificial Sequence: Synthetic polypeptide
QVQLQESGPGLVKPSETLSLTCTVSGVSLPDYGVSWIRQPPGKGLEWIGVIWGSETTYYQSSLKSRVTISKDNSKNQVSLKLSSVTAADTAVYYCAKHYYYGGSYAMDYWGQGTLVTVSSGGGGSGGGGSGGGGSEIVMTQSPATLSLSPGERATLSCRASQDISKYLNWYQQKPGQAPRLLIYHTSRLHSGIPARFSGSGSGTDYTLTISSLQPEDFAVYFCQQGNTLPYTFGQGTKLEIK

SEQ ID NO: 876 - protein, 247 aa, synthetic construct
  REGION 1..247: note = Description of Artificial Sequence: Synthetic polypeptide
EIVMTQSPATLSLSPGERATLSCRASQDISKYLNWYQQKPGQAPRLLIYHTSRLHSGIPARFSGSGSGTDYTLTISSLQPEDFAVYFCQQGNTLPYTFGQGTKLEIKGGGGSGGGGSGGGGSGGGGSQVQLQESGPGLVKPSETLSLTCTVSGVSLPDYGVSWIRQPPGKGLEWIGVIWGSETTYYSSSLKSRVTISKDNSKNQVSLKLSSVTAADTAVYYCAKHYYYGGSYAMDYWGQGTLVTVSS

SEQ ID NO: 877 - protein, 247 aa, synthetic construct
  REGION 1..247: note = Description of Artificial Sequence: Synthetic polypeptide
EIVMTQSPATLSLSPGERATLSCRASQDISKYLNWYQQKPGQAPRLLIYHTSRLHSGIPARFSGSGSGTDYTLTISSLQPEDFAVYFCQQGNTLPYTFGQGTKLEIKGGGGSGGGGSGGGGSGGGGSQVQLQESGPGLVKPSETLSLTCTVSGVSLPDYGVSWIRQPPGKGLEWIGVIWGSETTYYQSSLKSRVTISKDNSKNQVSLKLSSVTAADTAVYYCAKHYYYGGSYAMDYWGQGTLVTVSS

SEQ ID NO: 878 - protein, 247 aa, synthetic construct
  REGION 1..247: note = Description of Artificial Sequence: Synthetic polypeptide
QVQLQESGPGLVKPSETLSLTCTVSGVSLPDYGVSWIRQPPGKGLEWIGVIWGSETTYYSSSLKSRVTISKDNSKNQVSLKLSSVTAADTAVYYCAKHYYYGGSYAMDYWGQGTLVTVSSGGGGSGGGGSGGGGSGGGGSEIVMTQSPATLSLSPGERATLSCRASQDISKYLNWYQQKPGQAPRLLIYHTSRLHSGIPARFSGSGSGTDYTLTISSLQPEDFAVYFCQQGNTLPYTFGQGTKLEIK

SEQ ID NO: 879 - protein, 247 aa, synthetic construct
  REGION 1..247: note = Description of Artificial Sequence: Synthetic polypeptide
QVQLQESGPGLVKPSETLSLTCTVSGVSLPDYGVSWIRQPPGKGLEWIGVIWGSETTYYQSSLKSRVTISKDNSKNQVSLKLSSVTAADTAVYYCAKHYYYGGSYAMDYWGQGTLVTVSSGGGGSGGGGSGGGGSGGGGSEIVMTQSPATLSLSPGERATLSCRASQDISKYLNWYQQKPGQAPRLLIYHTSRLHSGIPARFSGSGSGTDYTLTISSLQPEDFAVYFCQQGNTLPYTFGQGTKLEIK

SEQ ID NO: 880 - protein, 247 aa, synthetic construct
  REGION 1..247: note = Description of Artificial Sequence: Synthetic polypeptide
EIVMTQSPATLSLSPGERATLSCRASQDISKYLNWYQQKPGQAPRLLIYHTSRLHSGIPARFSGSGSGTDYTLTISSLQPEDFAVYFCQQGNTLPYTFGQGTKLEIKGGGGSGGGGSGGGGSGGGGSQVQLQESGPGLVKPSETLSLTCTVSGVSLPDYGVSWIRQPPGKGLEWIGVIWGSETTYYNSSLKSRVTISKDNSKNQVSLKLSSVTAADTAVYYCAKHYYYGGSYAMDYWGQGTLVTVSS

SEQ ID NO: 881 - protein, 247 aa, synthetic construct
  REGION 1..247: note = Description of Artificial Sequence: Synthetic polypeptide
QVQLQESGPGLVKPSETLSLTCTVSGVSLPDYGVSWIRQPPGKGLEWIGVIWGSETTYYNSSLKSRVTISKDNSKNQVSLKLSSVTAADTAVYYCAKHYYYGGSYAMDYWGQGTLVTVSSGGGGSGGGGSGGGGSGGGGSEIVMTQSPATLSLSPGERATLSCRASQDISKYLNWYQQKPGQAPRLLIYHTSRLHSGIPARFSGSGSGTDYTLTISSLQPEDFAVYFCQQGNTLPYTFGQGTKLEIK

SEQ ID NO: 882 - protein, 242 aa, synthetic construct
  REGION 1..242: note = Description of Artificial Sequence: Synthetic polypeptide
EIVMTQSPATLSLSPGERATLSCRASQDISKYLNWYQQKPGQAPRLLIYHTSRLHSGIPARFSGSGSGTDYTLTISSLQPEDFAVYFCQQGNTLPYTFGQGTKLEIKGGGGSGGGGSGGGGSQVQLQESGPGLVKPSETLSLTCTVSGVSLPDYGVSWIRQPPGKGLEWIGVIWGSETTYYNSSLKSRVTISKDNSKNQVSLKLSSVTAADTAVYYCAKHYYYGGSYAMDYWGQGTLVTVSS

SEQ ID NO: 883 - protein, 242 aa, synthetic construct
  REGION 1..242: note = Description of Artificial Sequence: Synthetic polypeptide
QVQLQESGPGLVKPSETLSLTCTVSGVSLPDYGVSWIRQPPGKGLEWIGVIWGSETTYYNSSLKSRVTISKDNSKNQVSLKLSSVTAADTAVYYCAKHYYYGGSYAMDYWGQGTLVTVSSGGGGSGGGGSGGGGSEIVMTQSPATLSLSPGERATLSCRASQDISKYLNWYQQKPGQAPRLLIYHTSRLHSGIPARFSGSGSGTDYTLTISSLQPEDFAVYFCQQGNTLPYTFGQGTKLEIK

SEQ ID NO: 884 - protein, 242 aa, synthetic construct
  REGION 1..242: note = Description of Artificial Sequence: Synthetic polypeptide
DIQMTQTTSSLSASLGDRVTISCRASQDISKYLNWYQQKPDGTVKLLIYHTSRLHSGVPSRFSGSGSGTDYSLTISNLEQEDIATYFCQQGNTLPYTFGGGTKLEITGGGGSGGGGSGGGGSEVKLQESGPGLVAPSQSLSVTCTVSGVSLPDYGVSWIRQPPRKGLEWLGVIWGSETTYYNSALKSRLTIIKDNSKSQVFLKMNSLQTDDTAIYYCAKHYYYGGSYAMDYWGQGTSVTVSS

SEQ ID NO: 885 - protein, 119 aa, synthetic construct
  REGION 1..119: note = Description of Artificial Sequence: Synthetic polypeptide
QVQLLESGAELVRPGSSVKISCKASGYAFSSYWMNWVKQRPGQGLEWIGQIYPGDGDTNYNGKFKGQATLTADKSSSTAYMQLSGLTSEDSAVYSCARKTISSVVDFYFDYWGQGTTVT

SEQ ID NO: 886 - protein, 111 aa, synthetic construct
  REGION 1..111: note = Description of Artificial Sequence: Synthetic polypeptide
ELVLTQSPKFMSTSVGDRVSVTCKASQNVGTNVAWYQQKPGQSPKPLIYSATYRNSGVPDRFTGSGSGTDFTLTITNVQSKDLADYFYFCQYNRYPYTSGGGTKLEIKRRS

SEQ ID NO: 887 - protein, 244 aa, synthetic construct
  REGION 1..244: note = Description of Artificial Sequence: Synthetic polypeptide
QVQLLESGAELVRPGSSVKISCKASGYAFSSYWMNWVKQRPGQGLEWIGQIYPGDGDTNYNGKFKGQATLTADKSSSTAYMQLSGLTSEDSAVYSCARKTISSVVDFYFDYWGQGTTVTGGGSGGGSGGGSGGGSELVLTQSPKFMSTSVGDRVSVTCKASQNVGTNVAWYQQKPGQSPKPLIYSATYRNSGVPDRFTGSGSGTDFTLTITNVQSKDLADYFCQYNRYPYTSFFFTKLEIKRRS

SEQ ID NO: 888 - protein, 246 aa, synthetic construct
  REGION 1..246: note = Description of Artificial Sequence: Synthetic polypeptide
DIQMTQTTSSLSASLGDRVTISCRASQDISKYLNWYQQKPDGTVKLLIYHTSRLHSGVPSRFSGSGSGTDYSLTISNLEQEDIATYFCQQGNTLPYTFGGGTKLEITGSTSGSGKPGSGEGSTKGEVKLQESGPGLVAPSQSLSVTCTVSGVSLPDYGVSWIRQPPRKGLEWLGVIWGSETTYYNSALKSRLTIIKDNSKSQVFLKMNSLQTDDTAIYYCAKHYYYGGSYAMDYWGQGTSVTVSSE

SEQ ID NO: 889 - protein, 245 aa, synthetic construct
  REGION 1..245: note = Description of Artificial Sequence: Synthetic polypeptide
DIQMTQTTSSLSASLGDRVTISCRASQDISKYLNWYQQKPDGTVKLLIYHTSRLHSGVPSRFSGSGSGTDYSLTISNLEQEDIATYFCQQGNTLPYTFGGGTKLEITGSTSGSGKPGSGEGSTKGEVKLQESGPGLVAPSQSLSVTCTVSGVSLPDYGVSWIRQPPRKGLEWLGVIWGSETTYYNSALKSRLTIIKDNSKSQVFLKMNSLQTDDTAIYYCAKHYYYGGSYAMDYWGQGTSVTVSS

SEQ ID NO: 890 - protein, 30 aa, synthetic construct
  REGION 1..30: note = Description of Artificial Sequence: Synthetic polypeptide
  VARIANT 1..30: note = MISC_FEATURE - This sequence may encompass 1-6 'Gly Gly Gly Gly Ser' repeating units, wherein some positions may be absent
  REGION 1..30: note = See specification as filed for detailed description of substitutions and preferred embodiments
GGGGSGGGGSGGGGSGGGGSGGGGSGGGGS

SEQ ID NO: 891 - protein, 486 aa, synthetic construct
  REGION 1..486: note = Description of Artificial Sequence: Synthetic polypeptide
MALPVTALLLPLALLLHAARPDIQMTQTTSSLSASLGDRVTISCRASQDISKYLNWYQQKPDGTVKLLIYHTSRLHSGVPSRFSGSGSGTDYSLTISNLEQEDIATYFCQQGNTLPYTFGGGTKLEITGGGGSGGGGSGGGGSEVKLQESGPGLVAPSQSLSVTCTVSGVSLPDYGVSWIRQPPRKGLEWLGVIWGSETTYYNSALKSRLTIIKDNSKSQVFLKMNSLQTDDTAIYYCAKHYYYGGSYAMDYWGQGTSVTVSSTTTPAPRPPTPAPTIASQPLSLRPEACRPAAGGAVHTRGLDFACDIYIWAPLAGTCGVLLLSLVITLYCKRGRKKLLYIFKQPFMRPVQTTQEEDGCSCRFPEEEEGGCELRVKFSRSADAPAYKQGQNQLYNELNLGRREEYDVLDKRRGRDPEMGGKPRRKNPQEGLYNELQKDKMAEAYSEIGMKGERRRGKGHDGLYQGLSTATKDTYDALHMQALPPR

SEQ ID NO: 892 - protein, 465 aa, synthetic construct
  REGION 1..465: note = Description of Artificial Sequence: Synthetic polypeptide
DIQMTQTTSSLSASLGDRVTISCRASQDISKYLNWYQQKPDGTVKLLIYHTSRLHSGVPSRFSGSGSGTDYSLTISNLEQEDIATYFCQQGNTLPYTFGGGTKLEITGGGGSGGGGSGGGGSEVKLQESGPGLVAPSQSLSVTCTVSGVSLPDYGVSWIRQPPRKGLEWLGVIWGSETTYYNSALKSRLTIIKDNSKSQVFLKMNSLQTDDTAIYYCAKHYYYGGSYAMDYWGQGTSVTVSSTTTPAPRPPTPAPTIASQPLSLRPEACRPAAGGAVHTRGLDFACDIYIWAPLAGTCGVLLLSLVITLYCKRGRKKLLYIFKQPFMRPVQTTQEEDGCSCRFPEEEEGGCELRVKFSRSADAPAYKQGQNQLYNELNLGRREEYDVLDKRRGRDPEMGGKPRRKNPQEGLYNELQKDKMAEAYSEIGMKGERRRGKGHDGLYQGLSTATKDTYDALHMQALPPR

SEQ ID NO: 893 - protein, 242 aa, synthetic construct; identical to SEQ ID NO: 872
  REGION 1..242: note = Description of Artificial Sequence: Synthetic polypeptide

SEQ ID NO: 894 - DNA, 813 bp, synthetic construct
  misc_feature 1..813: note = Description of Artificial Sequence: Synthetic polynucleotide
  source 1..813: mol_type = other DNA
atggccctccctgtcaccgccctgctgcttccgctggctcttctgctccacgccgctcggcccgaaattgtgatgacccagtcacccgccactcttagcctttcacccggtgagcgcgcaaccctgtcttgcagagcctcccaagacatctcaaaataccttaattggtatcaacagaagcccggacaggctcctcgccttctgatctaccacaccagccggctccattctggaatccctgccaggttcagcggtagcggatctgggaccgactacaccctcactatcagctcactgcagccagaggacttcgctgtctatttctgtcagcaagggaacaccctgccctacacctttggacagggcaccaagctcgagattaaaggtggaggtggcagcggaggaggtgggtccggcggtggaggaagccaggtccaactccaagaaagcggaccgggtcttgtgaagccatcagaaactctttcactgacttgtactgtgagcggagtgtctctccccgattacggggtgtcttggatcagacagccaccggggaagggtctggaatggattggagtgatttggggctctgagactacttactactcttcatccctcaagtcacgcgtcaccatctcaaaggacaactctaagaatcaggtgtcactgaaactgtcatctgtgaccgcagccgacaccgccgtgtactattgcgctaagcattactattatggcgggagctacgcaatggattactggggacagggtactctggtcaccgtgtccagccaccaccatcatcaccatcaccat

SEQ ID NO: 895 - protein, 271 aa, synthetic construct
  REGION 1..271: note = Description of Artificial Sequence: Synthetic polypeptide
MALPVTALLLPLALLLHAARPEIVMTQSPATLSLSPGERATLSCRASQDISKYLNWYQQKPGQAPRLLIYHTSRLHSGIPARFSGSGSGTDYTLTISSLQPEDFAVYFCQQGNTLPYTFGQGTKLEIKGGGGSGGGGSGGGGSQVQLQESGPGLVKPSETLSLTCTVSGVSLPDYGVSWIRQPPGKGLEWIGVIWGSETTYYSSSLKSRVTISKDNSKNQVSLKLSSVTAADTAVYYCAKHYYYGGSYAMDYWGQGTLVTVSSHHHHHHHH

SEQ ID NO: 896 - DNA, 1458 bp, synthetic construct
  misc_feature 1..1458: note = Description of Artificial Sequence: Synthetic polynucleotide
  source 1..1458: mol_type = other DNA
atggccctccctgtcaccgccctgctgcttccgctggctcttctgctccacgccgctcggcccgaaattgtgatgacccagtcacccgccactcttagcctttcacccggtgagcgcgcaaccctgtcttgcagagcctcccaagacatctcaaaataccttaattggtatcaacagaagcccggacaggctcctcgccttctgatctaccacaccagccggctccattctggaatccctgccaggttcagcggtagcggatctgggaccgactacaccctcactatcagctcactgcagccagaggacttcgctgtctatttctgtcagcaagggaacaccctgccctacacctttggacagggcaccaagctcgagattaaaggtggaggtggcagcggaggaggtgggtccggcggtggaggaagccaggtccaactccaagaaagcggaccgggtcttgtgaagccatcagaaactctttcactgacttgtactgtgagcggagtgtctctccccgattacggggtgtcttggatcagacagccaccggggaagggtctggaatggattggagtgatttggggctctgagactacttactactcttcatccctcaagtcacgcgtcaccatctcaaaggacaactctaagaatcaggtgtcactgaaactgtcatctgtgaccgcagccgacaccgccgtgtactattgcgctaagcattactattatggcgggagctacgcaatggattactggggacagggtactctggtcaccgtgtccagcaccactaccccagcaccgaggccacccaccccggctcctaccatcgcctcccagcctctgtccctgcgtccggaggcatgtagacccgcagctggtggggccgtgcatacccggggtcttgacttcgcctgcgatatctacatttgggcccctctggctggtacttgcggggtcctgctgctttcactcgtgatcactctttactgtaagcgcggtcggaagaagctgctgtacatctttaagcaacccttcatgaggcctgtgcagactactcaagaggaggacggctgttcatgccggttcccagaggaggaggaaggcggctgcgaactgcgcgtgaaattcagccgcagcgcagatgctccagcctacaagcaggggcagaaccagctctacaacgaactcaatcttggtcggagagaggagtacgacgtgctggacaagcggagaggacgggacccagaaatgggcgggaagccgcgcagaaagaatccccaagagggcctgtacaacgagctccaaaaggataagatggcagaagcctatagcgagattggtatgaaaggggaacgcagaagaggcaaaggccacgacggactgtaccagggactcagcaccgccaccaaggacacctatgacgctcttcacatgcaggccctgccgcctcgg

SEQ ID NO: 897 - protein, 486 aa, synthetic construct
  REGION 1..486: note = Description of Artificial Sequence: Synthetic polypeptide
MALPVTALLLPLALLLHAARPEIVMTQSPATLSLSPGERATLSCRASQDISKYLNWYQQKPGQAPRLLIYHTSRLHSGIPARFSGSGSGTDYTLTISSLQPEDFAVYFCQQGNTLPYTFGQGTKLEIKGGGGSGGGGSGGGGSQVQLQESGPGLVKPSETLSLTCTVSGVSLPDYGVSWIRQPPGKGLEWIGVIWGSETTYYSSSLKSRVTISKDNSKNQVSLKLSSVTAADTAVYYCAKHYYYGGSYAMDYWGQGTLVTVSSTTTPAPRPPTPAPTIASQPLSLRPEACRPAAGGAVHTRGLDFACDIYIWAPLAGTCGVLLLSLVITLYCKRGRKKLLYIFKQPFMRPVQTTQEEDGCSCRFPEEEEGGCELRVKFSRSADAPAYKQGQNQLYNELNLGRREEYDVLDKRRGRDPEMGGKPRRKNPQEGLYNELQKDKMAEAYSEIGMKGERRRGKGHDGLYQGLSTATKDTYDALHMQALPPR

SEQ ID NO: 898 - protein, 242 aa, synthetic construct; identical to SEQ ID NO: 873
  REGION 1..242: note = Description of Artificial Sequence: Synthetic polypeptide

SEQ ID NO: 899 - DNA, 813 bp, synthetic construct
  misc_feature 1..813: note = Description of Artificial Sequence: Synthetic polynucleotide
  source 1..813: mol_type = other DNA
atggccctccctgtcaccgccctgctgcttccgctggctcttctgctccacgccgctcggcccgaaattgtgatgacccagtcacccgccactcttagcctttcacccggtgagcgcgcaaccctgtcttgcagagcctcccaagacatctcaaaataccttaattggtatcaacagaagcccggacaggctcctcgccttctgatctaccacaccagccggctccattctggaatccctgccaggttcagcggtagcggatctgggaccgactacaccctcactatcagctcactgcagccagaggacttcgctgtctatttctgtcagcaagggaacaccctgccctacacctttggacagggcaccaagctcgagattaaaggtggaggtggcagcggaggaggtgggtccggcggtggaggaagccaggtccaactccaagaaagcggaccgggtcttgtgaagccatcagaaactctttcactgacttgtactgtgagcggagtgtctctccccgattacggggtgtcttggatcagacagccaccggggaagggtctggaatggattggagtgatttggggctctgagactacttactaccaatcatccctcaagtcacgcgtcaccatctcaaaggacaactctaagaatcaggtgtcactgaaactgtcatctgtgaccgcagccgacaccgccgtgtactattgcgctaagcattactattatggcgggagctacgcaatggattactggggacagggtactctggtcaccgtgtccagccaccaccatcatcaccatcaccat

SEQ ID NO: 900 - protein, 271 aa, synthetic construct
  REGION 1..271: note = Description of Artificial Sequence: Synthetic polypeptide
MALPVTALLLPLALLLHAARPEIVMTQSPATLSLSPGERATLSCRASQDISKYLNWYQQKPGQAPRLLIYHTSRLHSGIPARFSGSGSGTDYTLTISSLQPEDFAVYFCQQGNTLPYTFGQGTKLEIKGGGGSGGGGSGGGGSQVQLQESGPGLVKPSETLSLTCTVSGVSLPDYGVSWIRQPPGKGLEWIGVIWGSETTYYQSSLKSRVTISKDNSKNQVSLKLSSVTAADTAVYYCAKHYYYGGSYAMDYWGQGTLVTVSSHHHHHHHH

SEQ ID NO: 901 - DNA, 1458 bp, synthetic construct
  misc_feature 1..1458: note = Description of Artificial Sequence: Synthetic polynucleotide
  source 1..1458: mol_type = other DNA
atggccctccctgtcaccgccctgctgcttccgctggctcttctgctccacgccgctcggcccgaaattgtgatgacccagtcacccgccactcttagcctttcacccggtgagcgcgcaaccctgtcttgcagagcctcccaagacatctcaaaataccttaattggtatcaacagaagcccggacaggctcctcgccttctgatctaccacaccagccggctccattctggaatccctgccaggttcagcggtagcggatctgggaccgactacaccctcactatcagctcactgcagccagaggacttcgctgtctatttctgtcagcaagggaacaccctgccctacacctttggacagggcaccaagctcgagattaaaggtggaggtggcagcggaggaggtgggtccggcggtggaggaagccaggtccaactccaagaaagcggaccgggtcttgtgaagccatcagaaactctttcactgacttgtactgtgagcggagtgtctctccccgattacggggtgtcttggatcagacagccaccggggaagggtctggaatggattggagtgatttggggctctgagactacttactaccaatcatccctcaagtcacgcgtcaccatctcaaaggacaactctaagaatcaggtgtcactgaaactgtcatctgtgaccgcagccgacaccgccgtgtactattgcgctaagcattactattatggcgggagctacgcaatggattactggggacagggtactctggtcaccgtgtccagcaccactaccccagcaccgaggccacccaccccggctcctaccatcgcctcccagcctctgtccctgcgtccggaggcatgtagacccgcagctggtggggccgtgcatacccggggtcttgacttcgcctgcgatatctacatttgggcccctctggctggtacttgcggggtcctgctgctttcactcgtgatcactctttactgtaagcgcggtcggaagaagctgctgtacatctttaagcaacccttcatgaggcctgtgcagactactcaagaggaggacggctgttcatgccggttcccagaggaggaggaaggcggctgcgaactgcgcgtgaaattcagccgcagcgcagatgctccagcctacaagcaggggcagaaccagctctacaacgaactcaatcttggtcggagagaggagtacgacgtgctggacaagcggagaggacgggacccagaaatgggcgggaagccgcgcagaaagaatccccaagagggcctgtacaacgagctccaaaaggataagatggcagaagcctatagcgagattggtatgaaaggggaacgcagaagaggcaaaggccacgacggactgtaccagggactcagcaccgccaccaaggacacctatgacgctcttcacatgcaggccctgccgcctcgg

SEQ ID NO: 902 - protein, 486 aa, synthetic construct
  REGION 1..486: note = Description of Artificial Sequence: Synthetic polypeptide
MALPVTALLLPLALLLHAARPEIVMTQSPATLSLSPGERATLSCRASQDISKYLNWYQQKPGQAPRLLIYHTSRLHSGIPARFSGSGSGTDYTLTISSLQPEDFAVYFCQQGNTLPYTFGQGTKLEIKGGGGSGGGGSGGGGSQVQLQESGPGLVKPSETLSLTCTVSGVSLPDYGVSWIRQPPGKGLEWIGVIWGSETTYYQSSLKSRVTISKDNSKNQVSLKLSSVTAADTAVYYCAKHYYYGGSYAMDYWGQGTLVTVSSTTTPAPRPPTPAPTIASQPLSLRPEACRPAAGGAVHTRGLDFACDIYIWAPLAGTCGVLLLSLVITLYCKRGRKKLLYIFKQPFMRPVQTTQEEDGCSCRFPEEEEGGCELRVKFSRSADAPAYKQGQNQLYNELNLGRREEYDVLDKRRGRDPEMGGKPRRKNPQEGLYNELQKDKMAEAYSEIGMKGERRRGKGHDGLYQGLSTATKDTYDALHMQALPPR

SEQ ID NO: 903 - protein, 242 aa, synthetic construct; identical to SEQ ID NO: 874
  REGION 1..242: note = Description of Artificial Sequence: Synthetic polypeptide

SEQ ID NO: 904 - DNA, 813 bp, synthetic construct
  misc_feature 1..813: note = Description of Artificial Sequence: Synthetic polynucleotide
  source 1..813: mol_type = other DNA
atggctctgcccgtgaccgcactcctcctgccactggctctgctgcttcacgccgctcgcccacaagtccagcttcaagaatcagggcctggtctggtgaagccatctgagactctgtccctcacttgcaccgtgagcggagtgtccctcccagactacggagtgagctggattagacagcctcccggaaagggactggagtggatcggagtgatttggggtagcgaaaccacttactattcatcttccctgaagtcacgggtcaccatttcaaaggataactcaaagaatcaagtgagcctcaagctctcatcagtcaccgccgctgacaccgccgtgtattactgtgccaagcattactactatggagggtcctacgccatggactactggggccagggaactctggtcactgtgtcatctggtggaggaggtagcggaggaggcgggagcggtggaggtggctccgaaatcgtgatgacccagagccctgcaaccctgtccctttctcccggggaacgggctaccctttcttgtcgggcatcacaagatatctcaaaatacctcaattggtatcaacagaagccgggacaggcccctaggcttcttatctaccacacctctcgcctgcatagcgggattcccgcacgctttagcgggtctggaagcgggaccgactacactctgaccatctcatctctccagcccgaggacttcgccgtctacttctgccagcagggtaacaccctgccgtacaccttcggccagggcaccaagcttgagatcaaacatcaccaccatcatcaccatcac

SEQ ID NO: 905 - protein, 271 aa, synthetic construct
  REGION 1..271: note = Description of Artificial Sequence: Synthetic polypeptide
MALPVTALLLPLALLLHAARPQVQLQESGPGLVKPSETLSLTCTVSGVSLPDYGVSWIRQPPGKGLEWIGVIWGSETTYYSSSLKSRVTISKDNSKNQVSLKLSSVTAADTAVYYCAKHYYYGGSYAMDYWGQGTLVTVSSGGGGSGGGGSGGGGSEIVMTQSPATLSLSPGERATLSCRASQDISKYLNWYQQKPGQAPRLLIYHTSRLHSGIPARFSGSGSGTDYTLTISSLQPEDFAVYFCQQGNTLPYTFGQGTKLEIKHHHHHHHH

SEQ ID NO: 906 - DNA, 1458 bp, synthetic construct
  misc_feature 1..1458: note = Description of Artificial Sequence: Synthetic polynucleotide
  source 1..1458: mol_type = other DNA
atggctctgcccgtgaccgcactcctcctgccactggctctgctgcttcacgccgctcgcccacaagtccagcttcaagaatcagggcctggtctggtgaagccatctgagactctgtccctcacttgcaccgtgagcggagtgtccctcccagactacggagtgagctggattagacagcctcccggaaagggactggagtggatcggagtgatttggggtagcgaaaccacttactattcatcttccctgaagtcacgggtcaccatttcaaaggataactcaaagaatcaagtgagcctcaagctctcatcagtcaccgccgctgacaccgccgtgtattactgtgccaagcattactactatggagggtcctacgccatggactactggggccagggaactctggtcactgtgtcatctggtggaggaggtagcggaggaggcgggagcggtggaggtggctccgaaatcgtgatgacccagagccctgcaaccctgtccctttctcccggggaacgggctaccctttcttgtcgggcatcacaagatatctcaaaatacctcaattggtatcaacagaagccgggacaggcccctaggcttcttatctaccacacctctcgcctgcatagcgggattcccgcacgctttagcgggtctggaagcgggaccgactacactctgaccatctcatctctccagcccgaggacttcgccgtctacttctgccagcagggtaacaccctgccgtacaccttcggccagggcaccaagcttgagatcaaaaccactactcccgctccaaggccacccacccctgccccgaccatcgcctctcagccgctttccctgcgtccggaggcatgtagacccgcagctggtggggccgtgcatacccggggtcttgacttcgcctgcgatatctacatttgggcccctctggctggtacttgcggggtcctgctgctttcactcgtgatcactctttactgtaagcgcggtcggaagaagctgctgtacatctttaagcaacccttcatgaggcctgtgcagactactcaagaggaggacggctgttcatgccggttcccagaggaggaggaaggcggctgcgaactgcgcgtgaaattcagccgcagcgcagatgctccagcctacaagcaggggcagaaccagctctacaacgaactcaatcttggtcggagagaggagtacgacgtgctggacaagcggagaggacgggacccagaaatgggcgggaagccgcgcagaaagaatccccaagagggcctgtacaacgagctccaaaaggataagatggcagaagcctatagcgagattggtatgaaaggggaacgcagaagaggcaaaggccacgacggactgtaccagggactcagcaccgccaccaaggacacctatgacgctcttcacatgcaggccctgccgcctcgg

SEQ ID NO: 907 - protein, 486 aa, synthetic construct
  REGION 1..486: note = Description of Artificial Sequence: Synthetic polypeptide
MALPVTALLLPLALLLHAARPQVQLQESGPGLVKPSETLSLTCTVSGVSLPDYGVSWIRQPPGKGLEWIGVIWGSETTYYSSSLKSRVTISKDNSKNQVSLKLSSVTAADTAVYYCAKHYYYGGSYAMDYWGQGTLVTVSSGGGGSGGGGSGGGGSEIVMTQSPATLSLSPGERATLSCRASQDISKYLNWYQQKPGQAPRLLIYHTSRLHSGIPARFSGSGSGTDYTLTISSLQPEDFAVYFCQQGNTLPYTFGQGTKLEIKTTTPAPRPPTPAPTIASQPLSLRPEACRPAAGGAVHTRGLDFACDIYIWAPLAGTCGVLLLSLVITLYCKRGRKKLLYIFKQPFMRPVQTTQEEDGCSCRFPEEEEGGCELRVKFSRSADAPAYKQGQNQLYNELNLGRREEYDVLDKRRGRDPEMGGKPRRKNPQEGLYNELQKDKMAEAYSEIGMKGERRRGKGHDGLYQGLSTATKDTYDALHMQALPPR

SEQ ID NO: 908 - protein, 242 aa, synthetic construct; identical to SEQ ID NO: 875
  REGION 1..242: note = Description of Artificial Sequence: Synthetic polypeptide

SEQ ID NO: 909 - DNA, 813 bp, synthetic construct
  misc_feature 1..813: note = Description of Artificial Sequence: Synthetic polynucleotide
  source 1..813: mol_type = other DNA
atggctctgcccgtgaccgcactcctcctgccactggctctgctgcttcacgccgctcgcccacaagtccagcttcaagaatcagggcctggtctggtgaagccatctgagactctgtccctcacttgcaccgtgagcggagtgtccctcccagactacggagtgagctggattagacagcctcccggaaagggactggagtggatcggagtgatttggggtagcgaaaccacttactatcaatcttccctgaagtcacgggtcaccatttcaaaggataactcaaagaatcaagtgagcctcaagctctcatcagtcaccgccgctgacaccgccgtgtattactgtgccaagcattactactatggagggtcctacgccatggactactggggccagggaactctggtcactgtgtcatctggtggaggaggtagcggaggaggcgggagcggtggaggtggctccgaaatcgtgatgacccagagccctgcaaccctgtccctttctcccggggaacgggctaccctttcttgtcgggcatcacaagatatctcaaaatacctcaattggtatcaacagaagccgggacaggcccctaggcttcttatctaccacacctctcgcctgcatagcgggattcccgcacgctttagcgggtctggaagcgggaccgactacactctgaccatctcatctctccagcccgaggacttcgccgtctacttctgccagcagggtaacaccctgccgtacaccttcggccagggcaccaagcttgagatcaaacatcaccaccatcatcaccatcac

SEQ ID NO: 910 - protein, 271 aa, synthetic construct
  REGION 1..271: note = Description of Artificial Sequence: Synthetic polypeptide
MALPVTALLLPLALLLHAARPQVQLQESGPGLVKPSETLSLTCTVSGVSLPDYGVSWIRQPPGKGLEWIGVIWGSETTYYQSSLKSRVTISKDNSKNQVSLKLSSVTAADTAVYYCAKHYYYGGSYAMDYWGQGTLVTVSSGGGGSGGGGSGGGGSEIVMTQSPATLSLSPGERATLSCRASQDISKYLNWYQQKPGQAPRLLIYHTSRLHSGIPARFSGSGSGTDYTLTISSLQPEDFAVYFCQQGNTLPYTFGQGTKLEIKHHHHHHHH

SEQ ID NO: 911 - DNA, 1458 bp, synthetic construct
  misc_feature 1..1458: note = Description of Artificial Sequence: Synthetic polynucleotide
  source 1..1458: mol_type = other DNA
atggctctgcccgtgaccgcactcctcctgccactggctctgctgcttcacgccgctcgcccacaagtccagcttcaagaatcagggcctggtctggtgaagccatctgagactctgtccctcacttgcaccgtgagcggagtgtccctcccagactacggagtgagctggattagacagcctcccggaaagggactggagtggatcggagtgatttggggtagcgaaaccacttactatcaatcttccctgaagtcacgggtcaccatttcaaaggataactcaaagaatcaagtgagcctcaagctctcatcagtcaccgccgctgacaccgccgtgtattactgtgccaagcattactactatggagggtcctacgccatggactactggggccagggaactctggtcactgtgtcatctggtggaggaggtagcggaggaggcgggagcggtggaggtggctccgaaatcgtgatgacccagagccctgcaaccctgtccctttctcccggggaacgggctaccctttcttgtcgggcatcacaagatatctcaaaatacctcaattggtatcaacagaagccgggacaggcccctaggcttcttatctaccacacctctcgcctgcatagcgggattcccgcacgctttagcgggtctggaagcgggaccgactacactctgaccatctcatctctccagcccgaggacttcgccgtctacttctgccagcagggtaacaccctgccgtacaccttcggccagggcaccaagcttgagatcaaaaccactactcccgctccaaggccacccacccctgccccgaccatcgcctctcagccgctttccctgcgtccggaggcatgtagacccgcagctggtggggccgtgcatacccggggtcttgacttcgcctgcgatatctacatttgggcccctctggctggtacttgcggggtcctgctgctttcactcgtgatcactctttactgtaagcgcggtcggaagaagctgctgtacatctttaagcaacccttcatgaggcctgtgcagactactcaagaggaggacggctgttcatgccggttcccagaggaggaggaaggcggctgcgaactgcgcgtgaaattcagccgcagcgcagatgctccagcctacaagcaggggcagaaccagctctacaacgaactcaatcttggtcggagagaggagtacgacgtgctggacaagcggagaggacgggacccagaaatgggcgggaagccgcgcagaaagaatccccaagagggcctgtacaacgagctccaaaaggataagatggcagaagcctatagcgagattggtatgaaaggggaacgcagaagaggcaaaggccacgacggactgtaccagggactcagcaccgccaccaaggacacctatgacgctcttcacatgcaggccctgccgcctcgg

SEQ ID NO: 912 - protein, 486 aa, synthetic construct
  REGION 1..486: note = Description of Artificial Sequence: Synthetic polypeptide
MALPVTALLLPLALLLHAARPQVQLQESGPGLVKPSETLSLTCTVSGVSLPDYGVSWIRQPPGKGLEWIGVIWGSETTYYQSSLKSRVTISKDNSKNQVSLKLSSVTAADTAVYYCAKHYYYGGSYAMDYWGQGTLVTVSSGGGGSGGGGSGGGGSEIVMTQSPATLSLSPGERATLSCRASQDISKYLNWYQQKPGQAPRLLIYHTSRLHSGIPARFSGSGSGTDYTLTISSLQPEDFAVYFCQQGNTLPYTFGQGTKLEIKTTTPAPRPPTPAPTIASQPLSLRPEACRPAAGGAVHTRGLDFACDIYIWAPLAGTCGVLLLSLVITLYCKRGRKKLLYIFKQPFMRPVQTTQEEDGCSCRFPEEEEGGCELRVKFSRSADAPAYKQGQNQLYNELNLGRREEYDVLDKRRGRDPEMGGKPRRKNPQEGLYNELQKDKMAEAYSEIGMKGERRRGKGHDGLYQGLSTATKDTYDALHMQALPPR

SEQ ID NO: 913 - protein, 247 aa, synthetic construct; identical to SEQ ID NO: 876
  REGION 1..247: note = Description of Artificial Sequence: Synthetic polypeptide

SEQ ID NO: 914 - DNA, 828 bp, synthetic construct
  misc_feature 1..828: note = Description of Artificial Sequence: Synthetic polynucleotide
  source 1..828: mol_type = other DNA
atggccctcccagtgaccgctctgctgctgcctctcgcacttcttctccatgccgctcggcctgagatcgtcatgacccaaagccccgctaccctgtccctgtcacccggcgagagggcaaccctttcatgcagggccagccaggacatttctaagtacctcaactggtatcagcagaagccagggcaggctcctcgcctgctgatctaccacaccagccgcctccacagcggtatccccgccagattttccgggagcgggtctggaaccgactacaccctcaccatctcttctctgcagcccgaggatttcgccgtctatttctgccagcaggggaatactctgccgtacaccttcggtcaaggtaccaagctggaaatcaagggaggcggaggatcaggcggtggcggaagcggaggaggtggctccggaggaggaggttcccaagtgcagcttcaagaatcaggacccggacttgtgaagccatcagaaaccctctccctgacttgtaccgtgtccggtgtgagcctccccgactacggagtctcttggattcgccagcctccggggaagggtcttgaatggattggggtgatttggggatcagagactacttactactcttcatcacttaagtcacgggtcaccatcagcaaagataatagcaagaaccaagtgtcacttaagctgtcatctgtgaccgccgctgacaccgccgtgtactattgtgccaaacattactattacggagggtcttatgctatggactactggggacaggggaccctggtgactgtctctagccatcaccatcaccaccatcatcac

SEQ ID NO: 915 - protein, 276 aa, synthetic construct
  REGION 1..276: note = Description of Artificial Sequence: Synthetic polypeptide
MALPVTALLLPLALLLHAARPEIVMTQSPATLSLSPGERATLSCRASQDISKYLNWYQQKPGQAPRLLIYHTSRLHSGIPARFSGSGSGTDYTLTISSLQPEDFAVYFCQQGNTLPYTFGQGTKLEIKGGGGSGGGGSGGGGSGGGGSQVQLQESGPGLVKPSETLSLTCTVSGVSLPDYGVSWIRQPPGKGLEWIGVIWGSETTYYSSSLKSRVTISKDNSKNQVSLKLSSVTAADTAVYYCAKHYYYGGSYAMDYWGQGTLVTVSSHHHHHHHH

SEQ ID NO: 916 - DNA, 1473 bp, synthetic construct
  misc_feature 1..1473: note = Description of Artificial Sequence: Synthetic polynucleotide
  source 1..1473: mol_type = other DNA
atggccctccctgtcaccgccctgctgcttccgctggctcttctgctccacgccgctcggcccgaaattgtgatgacccagtcacccgccactcttagcctttcacccggtgagcgcgcaaccctgtcttgcagagcctcccaagacatctcaaaataccttaattggtatcaacagaagcccggacaggctcctcgccttctgatctaccacaccagccggctccattctggaatccctgccaggttcagcggtagcggatctgggaccgactacaccctcactatcagctcactgcagccagaggacttcgctgtctatttctgtcagcaagggaacaccctgccctacacctttggacagggcaccaagctcgagattaaaggtggaggtggcagcggaggaggtgggtccggcggtggaggaagcggcggaggcgggagccaggtccaactccaagaaagcggaccgggtcttgtgaagccatcagaaactctttcactgacttgtactgtgagcggagtgtctctccccgattacggggtgtcttggatcagacagccaccggggaagggtctggaatggattggagtgatttggggctctgagactacttactactcttcatccctcaagtcacgcgtcaccatctcaaaggacaactctaagaatcaggtgtcactgaaactgtcatctgtgaccgcagccgacaccgccgtgtactattgcgctaagcattactattatggcgggagctacgcaatggattactggggacagggtactctggtcaccgtgtccagcaccactaccccagcaccgaggccacccaccccggctcctaccatcgcctcccagcctctgtccctgcgtccggaggcatgtagacccgcagctggtggggccgtgcatacccggggtcttgacttcgcctgcgatatctacatttgggcccctctggctggtacttgcggggtcctgctgctttcactcgtgatcactctttactgtaagcgcggtcggaagaagctgctgtacatctttaagcaacccttcatgaggcctgtgcagactactcaagaggaggacggctgttcatgccggttcccagaggaggaggaaggcggctgcgaactgcgcgtgaaattcagccgcagcgcagatgctccagcctacaagcaggggcagaaccagctctacaacgaactcaatcttggtcggagagaggagtacgacgtgctggacaagcggagaggacgggacccagaaatgggcgggaagccgcgcagaaagaatccccaagagggcctgtacaacgagctccaaaaggataagatggcagaagcctatagcgagattggtatgaaaggggaacgcagaagaggcaaaggccacgacggactgtaccagggactcagcaccgccaccaaggacacctatgacgctcttcacatgcaggccctgccgcctcgg

SEQ ID NO: 917 - protein, 491 aa, synthetic construct
  REGION 1..491: note = Description of Artificial Sequence: Synthetic polypeptide
MALPVTALLLPLALLLHAARPEIVMTQSPATLSLSPGERATLSCRASQDISKYLNWYQQKPGQAPRLLIYHTSRLHSGIPARFSGSGSGTDYTLTISSLQPEDFAVYFCQQGNTLPYTFGQGTKLEIKGGGGSGGGGSGGGGSGGGGSQVQLQESGPGLVKPSETLSLTCTVSGVSLPDYGVSWIRQPPGKGLEWIGVIWGSETTYYSSSLKSRVTISKDNSKNQVSLKLSSVTAADTAVYYCAKHYYYGGSYAMDYWGQGTLVTVSSTTTPAPRPPTPAPTIASQPLSLRPEACRPAAGGAVHTRGLDFACDIYIWAPLAGTCGVLLLSLVITLYCKRGRKKLLYIFKQPFMRPVQTTQEEDGCSCRFPEEEEGGCELRVKFSRSADAPAYKQGQNQLYNELNLGRREEYDVLDKRRGRDPEMGGKPRRKNPQEGLYNELQKDKMAEAYSEIGMKGERRRGKGHDGLYQGLSTATKDTYDALHMQALPPR

SEQ ID NO: 918 - protein, 247 aa, synthetic construct; identical to SEQ ID NO: 877
  REGION 1..247: note = Description of Artificial Sequence: Synthetic polypeptide

SEQ ID NO: 919 - DNA, 828 bp, synthetic construct
  misc_feature 1..828: note = Description of Artificial Sequence: Synthetic polynucleotide
  source 1..828: mol_type = other DNA
atggccctcccagtgaccgctctgctgctgcctctcgcacttcttctccatgccgctcggcctgagatcgtcatgacccaaagccccgctaccctgtccctgtcacccggcgagagggcaaccctttcatgcagggccagccaggacatttctaagtacctcaactggtatcagcagaagccagggcaggctcctcgcctgctgatctaccacaccagccgcctccacagcggtatccccgccagattttccgggagcgggtctggaaccgactacaccctcaccatctcttctctgcagcccgaggatttcgccgtctatttctgccagcaggggaatactctgccgtacaccttcggtcaaggtaccaagctggaaatcaagggaggcggaggatcaggcggtggcggaagcggaggaggtggctccggaggaggaggttcccaagtgcagcttcaagaatcaggacccggacttgtgaagccatcagaaaccctctccctgacttgtaccgtgtccggtgtgagcctccccgactacggagtctcttggattcgccagcctccggggaagggtcttgaatggattggggtgatttggggatcagagactacttactaccagtcatcacttaagtcacgggtcaccatcagcaaagataatagcaagaaccaagtgtcacttaagctgtcatctgtgaccgccgctgacaccgccgtgtactattgtgccaaacattactattacggagggtcttatgctatggactactggggacaggggaccctggtgactgtctctagccatcaccatcaccaccatcatcac

SEQ ID NO: 920 - protein, 276 aa, synthetic construct
  REGION 1..276: note = Description of Artificial Sequence: Synthetic polypeptide
MALPVTALLLPLALLLHAARPEIVMTQSPATLSLSPGERATLSCRASQDISKYLNWYQQKPGQAPRLLIYHTSRLHSGIPARFSGSGSGTDYTLTISSLQPEDFAVYFCQQGNTLPYTFGQGTKLEIKGGGGSGGGGSGGGGSGGGGSQVQLQESGPGLVKPSETLSLTCTVSGVSLPDYGVSWIRQPPGKGLEWIGVIWGSETTYYQSSLKSRVTISKDNSKNQVSLKLSSVTAADTAVYYCAKHYYYGGSYAMDYWGQGTLVTVSSHHHHHHHH

SEQ ID NO: 921 - DNA, 1473 bp, synthetic construct
  misc_feature 1..1473: note = Description of Artificial Sequence: Synthetic polynucleotide
  source 1..1473: mol_type = other DNA
atggccctccctgtcaccgccctgctgcttccgctggctcttctgctccacgccgctcggcccgaaattgtgatgacccagtcacccgccactcttagcctttcacccggtgagcgcgcaaccctgtcttgcagagcctcccaagacatctcaaaataccttaattggtatcaacagaagcccggacaggctcctcgccttctgatctaccacaccagccggctccattctggaatccctgccaggttcagcggtagcggatctgggaccgactacaccctcactatcagctcactgcagccagaggacttcgctgtctatttctgtcagcaagggaacaccctgccctacacctttggacagggcaccaagctcgagattaaaggtggaggtggcagcggaggaggtgggtccggcggtggaggaagcggaggcggagggagccaggtccaactccaagaaagcggaccgggtcttgtgaagccatcagaaactctttcactgacttgtactgtgagcggagtgtctctccccgattacggggtgtcttggatcagacagccaccggggaagggtctggaatggattggagtgatttggggctctgagactacttactaccaatcatccctcaagtcacgcgtcaccatctcaaaggacaactctaagaatcaggtgtcactgaaactgtcatctgtgaccgcagccgacaccgccgtgtactattgcgctaagcattactattatggcgggagctacgcaatggattactggggacagggtactctggtcaccgtgtccagcaccactaccccagcaccgaggccacccaccccggctcctaccatcgcctcccagcctctgtccctgcgtccggaggcatgtagacccgcagctggtggggccgtgcatacccggggtcttgacttcgcctgcgatatctacatttgggcccctctggctggtacttgcggggtcctgctgctttcactcgtgatcactctttactgtaagcgcggtcggaagaagctgctgtacatctttaagcaacccttcatgaggcctgtgcagactactcaagaggaggacggctgttcatgccggttcccagaggaggaggaaggcggctgcgaactgcgcgtgaaattcagccgcagcgcagatgctccagcctacaagcaggggcagaaccagctctacaacgaactcaatcttggtcggagagaggagtacgacgtgctggacaagcggagaggacgggacccagaaatgggcgggaagccgcgcagaaagaatccccaagagggcctgtacaacgagctccaaaaggataagatggcagaagcctatagcgagattggtatgaaaggggaacgcagaagaggcaaaggccacgacggactgtaccagggactcagcaccgccaccaaggacacctatgacgctcttcacatgcaggccctgccgcctcgg

SEQ ID NO: 922 - protein, 491 aa, synthetic construct
  REGION 1..491: note = Description of Artificial Sequence: Synthetic polypeptide
MALPVTALLLPLALLLHAARPEIVMTQSPATLSLSPGERATLSCRASQDISKYLNWYQQKPGQAPRLLIYHTSRLHSGIPARFSGSGSGTDYTLTISSLQPEDFAVYFCQQGNTLPYTFGQGTKLEIKGGGGSGGGGSGGGGSGGGGSQVQLQESGPGLVKPSETLSLTCTVSGVSLPDYGVSWIRQPPGKGLEWIGVIWGSETTYYQSSLKSRVTISKDNSKNQVSLKLSSVTAADTAVYYCAKHYYYGGSYAMDYWGQGTLVTVSSTTTPAPRPPTPAPTIASQPLSLRPEACRPAAGGAVHTRGLDFACDIYIWAPLAGTCGVLLLSLVITLYCKRGRKKLLYIFKQPFMRPVQTTQEEDGCSCRFPEEEEGGCELRVKFSRSADAPAYKQGQNQLYNELNLGRREEYDVLDKRRGRDPEMGGKPRRKNPQEGLYNELQKDKMAEAYSEIGMKGERRRGKGHDGLYQGLSTATKDTYDALHMQALPPR

SEQ ID NO: 923 - protein, 247 aa, synthetic construct; identical to SEQ ID NO: 878
  REGION 1..247: note = Description of Artificial Sequence: Synthetic polypeptide

SEQ ID NO: 924 - DNA, 828 bp, synthetic construct
  misc_feature 1..828: note = Description of Artificial Sequence: Synthetic polynucleotide
  source 1..828: mol_type = other DNA
atggcactgcctgtcactgccctcctgctgcctctggccctccttctgcatgccgccaggccccaagtccagctgcaagagtcaggacccggactggtgaagccgtctgagactctctcactgacttgtaccgtcagcggcgtgtccctccccgactacggagtgtcatggatccgccaacctcccgggaaagggcttgaatggattggtgtcatctggggttctgaaaccacctactactcatcttccctgaagtccagggtgaccatcagcaaggataattccaagaaccaggtcagccttaagctgtcatctgtgaccgctgctgacaccgccgtgtattactgcgccaagcactactattacggaggaagctacgctatggactattggggacagggcactctcgtgactgtgagcagcggcggtggagggtctggaggtggaggatccggtggtggtgggtcaggcggaggagggagcgagattgtgatgactcagtcaccagccaccctttctctttcacccggcgagagagcaaccctgagctgtagagccagccaggacatttctaagtacctcaactggtatcagcaaaaaccggggcaggcccctcgcctcctgatctaccatacctcacgccttcactctggtatccccgctcggtttagcggatcaggatctggtaccgactacactctgaccatttccagcctgcagccagaagatttcgcagtgtatttctgccagcagggcaatacccttccttacaccttcggtcagggaaccaagctcgaaatcaagcaccatcaccatcatcaccaccat

SEQ ID NO: 925 - protein, 276 aa, synthetic construct
  REGION 1..276: note = Description of Artificial Sequence: Synthetic polypeptide
MALPVTALLLPLALLLHAARPQVQLQESGPGLVKPSETLSLTCTVSGVSLPDYGVSWIRQPPGKGLEWIGVIWGSETTYYSSSLKSRVTISKDNSKNQVSLKLSSVTAADTAVYYCAKHYYYGGSYAMDYWGQGTLVTVSSGGGGSGGGGSGGGGSGGGGSEIVMTQSPATLSLSPGERATLSCRASQDISKYLNWYQQKPGQAPRLLIYHTSRLHSGIPARFSGSGSGTDYTLTISSLQPEDFAVYFCQQGNTLPYTFGQGTKLEIKHHHHHHHH

SEQ ID NO: 926 - DNA, 1473 bp, synthetic construct
  misc_feature 1..1473: note = Description of Artificial Sequence: Synthetic polynucleotide
  source 1..1473: mol_type = other DNA
atggctctgcccgtgaccgcactcctcctgccactggctctgctgcttcacgccgctcgcccacaagtccagcttcaagaatcagggcctggtctggtgaagccatctgagactctgtccctcacttgcaccgtgagcggagtgtccctcccagactacggagtgagctggattagacagcctcccggaaagggactggagtggatcggagtgatttggggtagcgaaaccacttactattcatcttccctgaagtcacgggtcaccatttcaaaggataactcaaagaatcaagtgagcctcaagctctcatcagtcaccgccgctgacaccgccgtgtattactgtgccaagcattactactatggagggtcctacgccatggactactggggccagggaactctggtcactgtgtcatctggtggaggaggtagcggaggaggcgggagcggtggaggtggctccggaggtggcggaagcgaaatcgtgatgacccagagccctgcaaccctgtccctttctcccggggaacgggctaccctttcttgtcgggcatcacaagatatctcaaaatacctcaattggtatcaacagaagccgggacaggcccctaggcttcttatctaccacacctctcgcctgcatagcgggattcccgcacgctttagcgggtctggaagcgggaccgactacactctgaccatctcatctctccagcccgaggacttcgccgtctacttctgccagcagggtaacaccctgccgtacaccttcggccagggcaccaagcttgagatcaaaaccactactcccgctccaaggccacccacccctgccccgaccatcgcctctcagccgctttccctgcgtccggaggcatgtagacccgcagctggtggggccgtgcatacccggggtcttgacttcgcctgcgatatctacatttgggcccctctggctggtacttgcggggtcctgctgctttcactcgtgatcactctttactgtaagcgcggtcggaagaagctgctgtacatctttaagcaacccttcatgaggcctgtgcagactactcaagaggaggacggctgttcatgccggttcccagaggaggaggaaggcggctgcgaactgcgcgtgaaattcagccgcagcgcagatgctccagcctacaagcaggggcagaaccagctctacaacgaactcaatcttggtcggagagaggagtacgacgtgctggacaagcggagaggacgggacccagaaatgggcgggaagccgcgcagaaagaatccccaagagggcctgtacaacgagctccaaaaggataagatggcagaagcctatagcgagattggtatgaaaggggaacgcagaagaggcaaaggccacgacggactgtaccagggactcagcaccgccaccaaggacacctatgacgctcttcacatgcaggccctgccgcctcgg

SEQ ID NO: 927 - protein, 491 aa, synthetic construct
  REGION 1..491: note = Description of Artificial Sequence: Synthetic polypeptide
MALPVTALLLPLALLLHAARPQVQLQESGPGLVKPSETLSLTCTVSGVSLPDYGVSWIRQPPGKGLEWIGVIWGSETTYYSSSLKSRVTISKDNSKNQVSLKLSSVTAADTAVYYCAKHYYYGGSYAMDYWGQGTLVTVSSGGGGSGGGGSGGGGSGGGGSEIVMTQSPATLSLSPGERATLSCRASQDISKYLNWYQQKPGQAPRLLIYHTSRLHSGIPARFSGSGSGTDYTLTISSLQPEDFAVYFCQQGNTLPYTFGQGTKLEIKTTTPAPRPPTPAPTIASQPLSLRPEACRPAAGGAVHTRGLDFACDIYIWAPLAGTCGVLLLSLVITLYCKRGRKKLLYIFKQPFMRPVQTTQEEDGCSCRFPEEEEGGCELRVKFSRSADAPAYKQGQNQLYNELNLGRREEYDVLDKRRGRDPEMGGKPRRKNPQEGLYNELQKDKMAEAYSEIGMKGERRRGKGHDGLYQGLSTATKDTYDALHMQALPPR

SEQ ID NO: 928 - protein, 247 aa, synthetic construct; identical to SEQ ID NO: 879
  REGION 1..247: note = Description of Artificial Sequence: Synthetic polypeptide

SEQ ID NO: 929 - DNA, 828 bp, synthetic construct
  misc_feature 1..828: note = Description of Artificial Sequence: Synthetic polynucleotide
  source 1..828: mol_type = other DNA
atggcactgcctgtcactgccctcctgctgcctctggccctccttctgcatgccgccaggccccaagtccagctgcaagagtcaggacccggactggtgaagccgtctgagactctctcactgacttgtaccgtcagcggcgtgtccctccccgactacggagtgtcatggatccgccaacctcccgggaaagggcttgaatggattggtgtcatctggggttctgaaaccacctactaccagtcttccctgaagtccagggtgaccatcagcaaggataattccaagaaccaggtcagccttaagctgtcatctgtgaccgctgctgacaccgccgtgtattactgcgccaagcactactattacggaggaagctacgctatggactattggggacagggcactctcgtgactgtgagcagcggcggtggagggtctggaggtggaggatccggtggtggtgggtcaggcggaggagggagcgagattgtgatgactcagtcaccagccaccctttctctttcacccggcgagagagcaaccctgagctgtagagccagccaggacatttctaagtacctcaactggtatcagcaaaaaccggggcaggcccctcgcctcctgatctaccatacctcacgccttcactctggtatccccgctcggtttagcggatcaggatctggtaccgactacactctgaccatttccagcctgcagccagaagatttcgcagtgtatttctgccagcagggcaatacccttccttacaccttcggtcagggaaccaagctcgaaatcaagcaccatcaccatcatcatcaccac

SEQ ID NO: 930 - protein, 276 aa, synthetic construct
  REGION 1..276: note = Description of Artificial Sequence: Synthetic polypeptide
MALPVTALLLPLALLLHAARPQVQLQESGPGLVKPSETLSLTCTVSGVSLPDYGVSWIRQPPGKGLEWIGVIWGSETTYYQSSLKSRVTISKDNSKNQVSLKLSSVTAADTAVYYCAKHYYYGGSYAMDYWGQGTLVTVSSGGGGSGGGGSGGGGSGGGGSEIVMTQSPATLSLSPGERATLSCRASQDISKYLNWYQQKPGQAPRLLIYHTSRLHSGIPARFSGSGSGTDYTLTISSLQPEDFAVYFCQQGNTLPYTFGQGTKLEIKHHHHHHHH

SEQ ID NO: 931 - DNA, 1473 bp, synthetic construct
  misc_feature 1..1473: note = Description of Artificial Sequence: Synthetic polynucleotide
  source 1..1473: mol_type = other DNA
atggctctgcccgtgaccgcactcctcctgccactggctctgctgcttcacgccgctcgcccacaagtccagcttcaagaatcagggcctggtctggtgaagccatctgagactctgtccctcacttgcaccgtgagcggagtgtccctcccagactacggagtgagctggattagacagcctcccggaaagggactggagtggatcggagtgatttggggtagcgaaaccacttactatcaatcttccctgaagtcacgggtcaccatttcaaaggataactcaaagaatcaagtgagcctcaagctctcatcagtcaccgccgctgacaccgccgtgtattactgtgccaagcattactactatggagggtcctacgccatggactactggggccagggaactctggtcactgtgtcatctggtggaggaggtagcggaggaggcgggagcggtggaggtggctccggaggcggtgggtcagaaatcgtgatgacccagagccctgcaaccctgtccctttctcccggggaacgggctaccctttcttgtcgggcatcacaagatatctcaaaatacctcaattggtatcaacagaagccgggacaggcccctaggcttcttatctaccacacctctcgcctgcatagcgggattcccgcacgctttagcgggtctggaagcgggaccgactacactctgaccatctcatctctccagcccgaggacttcgccgtctacttctgccagcagggtaacaccctgccgtacaccttcggccagggcaccaagcttgagatcaaaaccactactcccgctccaaggccacccacccctgccccgaccatcgcctctcagccgctttccctgcgtccggaggcatgtagacccgcagctggtggggccgtgcatacccggggtcttgacttcgcctgcgatatctacatttgggcccctctggctggtacttgcggggtcctgctgctttcactcgtgatcactctttactgtaagcgcggtcggaagaagctgctgtacatctttaagcaacccttcatgaggcctgtgcagactactcaagaggaggacggctgttcatgccggttcccagaggaggaggaaggcggctgcgaactgcgcgtgaaattcagccgcagcgcagatgctccagcctacaagcaggggcagaaccagctctacaacgaactcaatcttggtcggagagaggagtacgacgtgctggacaagcggagaggacgggacccagaaatgggcgggaagccgcgcagaaagaatccccaagagggcctgtacaacgagctccaaaaggataagatggcagaagcctatagcgagattggtatgaaaggggaacgcagaagaggcaaaggccacgacggactgtaccagggactcagcaccgccaccaaggacacctatgacgctcttcacatgcaggccctgccgcctcgg

SEQ ID NO: 932 - protein, 491 aa, synthetic construct
  REGION 1..491: note = Description of Artificial Sequence: Synthetic polypeptide
MALPVTALLLPLALLLHAARPQVQLQESGPGLVKPSETLSLTCTVSGVSLPDYGVSWIRQPPGKGLEWIGVIWGSETTYYQSSLKSRVTISKDNSKNQVSLKLSSVTAADTAVYYCAKHYYYGGSYAMDYWGQGTLVTVSSGGGGSGGGGSGGGGSGGGGSEIVMTQSPATLSLSPGERATLSCRASQDISKYLNWYQQKPGQAPRLLIYHTSRLHSGIPARFSGSGSGTDYTLTISSLQPEDFAVYFCQQGNTLPYTFGQGTKLEIKTTTPAPRPPTPAPTIASQPLSLRPEACRPAAGGAVHTRGLDFACDIYIWAPLAGTCGVLLLSLVITLYCKRGRKKLLYIFKQPFMRPVQTTQEEDGCSCRFPEEEEGGCELRVKFSRSADAPAYKQGQNQLYNELNLGRREEYDVLDKRRGRDPEMGGKPRRKNPQEGLYNELQKDKMAEAYSEIGMKGERRRGKGHDGLYQGLSTATKDTYDALHMQALPPR

SEQ ID NO: 933 - protein, 247 aa, synthetic construct; identical to SEQ ID NO: 880
  REGION 1..247: note = Description of Artificial Sequence: Synthetic polypeptide

SEQ ID NO: 934 - DNA, 828 bp, synthetic construct
  misc_feature 1..828: note = Description of Artificial Sequence: Synthetic polynucleotide
  source 1..828: mol_type = other DNA
atggccctcccagtgaccgctctgctgctgcctctcgcacttcttctccatgccgctcggcctgagatcgtcatgacccaaagccccgctaccctgtccctgtcacccggcgagagggcaaccctttcatgcagggccagccaggacatttctaagtacctcaactggtatcagcagaagccagggcaggctcctcgcctgctgatctaccacaccagccgcctccacagcggtatccccgccagattttccgggagcgggtctggaaccgactacaccctcaccatctcttctctgcagcccgaggatttcgccgtctatttctgccagcaggggaatactctgccgtacaccttcggtcaaggtaccaagctggaaatcaagggaggcggaggatcaggcggtggcggaagcggaggaggtggctccggaggaggaggttcccaagtgcagcttcaagaatcaggacccggacttgtgaagccatcagaaaccctctccctgacttgtaccgtgtccggtgtgagcctccccgactacggagtctcttggattcgccagcctccggggaagggtcttgaatggattggggtgatttggggatcagagactacttactacaattcatcacttaagtcacgggtcaccatcagcaaagataatagcaagaaccaagtgtcacttaagctgtcatctgtgaccgccgctgacaccgccgtgtactattgtgccaaacattactattacggagggtcttatgctatggactactggggacaggggaccctggtgactgtctctagccatcaccatcaccaccatcatcac

SEQ ID NO: 935 - protein, 276 aa, synthetic construct
  REGION 1..276: note = Description of Artificial Sequence: Synthetic polypeptide
MALPVTALLLPLALLLHAARPEIVMTQSPATLSLSPGERATLSCRASQDISKYLNWYQQKPGQAPRLLIYHTSRLHSGIPARFSGSGSGTDYTLTISSLQPEDFAVYFCQQGNTLPYTFGQGTKLEIKGGGGSGGGGSGGGGSGGGGSQVQLQESGPGLVKPSETLSLTCTVSGVSLPDYGVSWIRQPPGKGLEWIGVIWGSETTYYNSSLKSRVTISKDNSKNQVSLKLSSVTAADTAVYYCAKHYYYGGSYAMDYWGQGTLVTVSSHHHHHHHH

SEQ ID NO: 936 - DNA, 1473 bp, synthetic construct
  misc_feature 1..1473: note = Description of Artificial Sequence: Synthetic polynucleotide
  source 1..1473: mol_type = other DNA
atggccctccctgtcaccgccctgctgcttccgctggctcttctgctccacgccgctcggcccgaaattgtgatgacccagtcacccgccactcttagcctttcacccggtgagcgcgcaaccctgtcttgcagagcctcccaagacatctcaaaataccttaattggtatcaacagaagcccggacaggctcctcgccttctgatctaccacaccagccggctccattctggaatccctgccaggttcagcggtagcggatctgggaccgactacaccctcactatcagctcactgcagccagaggacttcgctgtctatttctgtcagcaagggaacaccctgccctacacctttggacagggcaccaagctcgagattaaaggtggaggtggcagcggaggaggtgggtccggcggtggaggaagcggaggcggtgggagccaggtccaactccaagaaagcggaccgggtcttgtgaagccatcagaaactctttcactgacttgtactgtgagcggagtgtctctccccgattacggggtgtcttggatcagacagccaccggggaagggtctggaatggattggagtgatttggggctctgagactacttactacaactcatccctcaagtcacgcgtcaccatctcaaaggacaactctaagaatcaggtgtcactgaaactgtcatctgtgaccgcagccgacaccgccgtgtactattgcgctaagcattactattatggcgggagctacgcaatggattactggggacagggtactctggtcaccgtgtccagcaccactaccccagcaccgaggccacccaccccggctcctaccatcgcctcccagcctctgtccctgcgtccggaggcatgtagacccgcagctggtggggccgtgcatacccggggtcttgacttcgcctgcgatatctacatttgggcccctctggctggtacttgcggggtcctgctgctttcactcgtgatcactctttactgtaagcgcggtcggaagaagctgctgtacatctttaagcaacccttcatgaggcctgtgcagactactcaagaggaggacggctgttcatgccggttcccagaggaggaggaaggcggctgcgaactgcgcgtgaaattcagccgcagcgcagatgctccagcctacaagcaggggcagaaccagctctacaacgaactcaatcttggtcggagagaggagtacgacgtgctggacaagcggagaggacgggacccagaaatgggcgggaagccgcgcagaaagaatccccaagagggcctgtacaacgagctccaaaaggataagatggcagaagcctatagcgagattggtatgaaaggggaacgcagaagaggcaaaggccacgacggactgtaccagggactcagcaccgccaccaaggacacctatgacgctcttcacatgcaggccctgccgcctcgg

SEQ ID NO: 937 - protein, 491 aa, synthetic construct
  REGION 1..491: note = Description of Artificial Sequence: Synthetic polypeptide
MALPVTALLLPLALLLHAARPEIVMTQSPATLSLSPGERATLSCRASQDISKYLNWYQQKPGQAPRLLIYHTSRLHSGIPARFSGSGSGTDYTLTISSLQPEDFAVYFCQQGNTLPYTFGQGTKLEIKGGGGSGGGGSGGGGSGGGGSQVQLQESGPGLVKPSETLSLTCTVSGVSLPDYGVSWIRQPPGKGLEWIGVIWGSETTYYNSSLKSRVTISKDNSKNQVSLKLSSVTAADTAVYYCAKHYYYGGSYAMDYWGQGTLVTVSSTTTPAPRPPTPAPTIASQPLSLRPEACRPAAGGAVHTRGLDFACDIYIWAPLAGTCGVLLLSLVITLYCKRGRKKLLYIFKQPFMRPVQTTQEEDGCSCRFPEEEEGGCELRVKFSRSADAPAYKQGQNQLYNELNLGRREEYDVLDKRRGRDPEMGGKPRRKNPQEGLYNELQKDKMAEAYSEIGMKGERRRGKGHDGLYQGLSTATKDTYDALHMQALPPR

SEQ ID NO: 938 - protein, 247 aa, synthetic construct; identical to SEQ ID NO: 881
  REGION 1..247: note = Description of Artificial Sequence: Synthetic polypeptide

SEQ ID NO: 939 - DNA, 828 bp, synthetic construct
  misc_feature 1..828: note = Description of Artificial Sequence: Synthetic polynucleotide
  source 1..828: mol_type = other DNA
atggcactgcctgtcactgccctcctgctgcctctggccctccttctgcatgccgccaggccccaagtccagctgcaagagtcaggacccggactggtgaagccgtctgagactctctcactgacttgtaccgtcagcggcgtgtccctccccgactacggagtgtcatggatccgccaacctcccgggaaagggcttgaatggattggtgtcatctggggttctgaaaccacctactacaactcttccctgaagtccagggtgaccatcagcaaggataattccaagaaccaggtcagccttaagctgtcatctgtgaccgctgctgacaccgccgtgtattactgcgccaagcactactattacggaggaagctacgctatggactattggggacagggcactctcgtgactgtgagcagcggcggtggagggtctggaggtggaggatccggtggtggtgggtcaggcggaggagggagcgagattgtgatgactcagtcaccagccaccctttctctttcacccggcgagagagcaaccctgagctgtagagccagccaggacatttctaagtacctcaactggtatcagcaaaaaccggggcaggcccctcgcctcctgatctaccatacctcacgccttcactctggtatccccgctcggtttagcggatcaggatctggtaccgactacactctgaccatttccagcctgcagccagaagatttcgcagtgtatttctgccagcagggcaatacccttccttacaccttcggtcagggaaccaagctcgaaatcaagcaccatcaccatcatcaccaccat

SEQ ID NO: 940 - protein, 276 aa, synthetic construct
  REGION 1..276: note = Description of Artificial Sequence: Synthetic polypeptide
MALPVTALLLPLALLLHAARPQVQLQESGPGLVKPSETLSLTCTVSGVSLPDYGVSWIRQPPGKGLEWIGVIWGSETTYYNSSLKSRVTISKDNSKNQVSLKLSSVTAADTAVYYCAKHYYYGGSYAMDYWGQGTLVTVSSGGGGSGGGGSGGGGSGGGGSEIVMTQSPATLSLSPGERATLSCRASQDISKYLNWYQQKPGQAPRLLIYHTSRLHSGIPARFSGSGSGTDYTLTISSLQPEDFAVYFCQQGNTLPYTFGQGTKLEIKHHHHHHHH

SEQ ID NO: 941 - DNA, 1473 bp, synthetic construct; identical to SEQ ID NO: 936
  misc_feature 1..1473: note = Description of Artificial Sequence: Synthetic polynucleotide
  source 1..1473: mol_type = other DNA

SEQ ID NO: 942 - protein, 491 aa, synthetic construct; identical to SEQ ID NO: 937
  REGION 1..491: note = Description of Artificial Sequence: Synthetic polypeptide

SEQ ID NO: 943 - protein, 242 aa, synthetic construct; identical to SEQ ID NO: 882
  REGION 1..242: note = Description of Artificial Sequence: Synthetic polypeptide

SEQ ID NO: 944 - DNA, 813 bp, synthetic construct
  misc_feature 1..813: note = Description of Artificial Sequence: Synthetic polynucleotide
  source 1..813: mol_type = other DNA
atggccctccctgtcaccgccctgctgcttccgctggctcttctgctccacgccgctcggcccgaaattgtgatgacccagtcacccgccactcttagcctttcacccggtgagcgcgcaaccctgtcttgcagagcctcccaagacatctcaaaataccttaattggtatcaacagaagcccggacaggctcctcgccttctgatctaccacaccagccggctccattctggaatccctgccaggttcagcggtagcggatctgggaccgactacaccctcactatcagctcactgcagccagaggacttcgctgtctatttctgtcagcaagggaacaccctgccctacacctttggacagggcaccaagctcgagattaaaggtggaggtggcagcggaggaggtgggtccggcggtggaggaagccaggtccaactccaagaaagcggaccgggtcttgtgaagccatcagaaactctttcactgacttgtactgtgagcggagtgtctctccccgattacggggtgtcttggatcagacagccaccggggaagggtctggaatggattggagtgatttggggctctgagactacttactacaattcatccctcaagtcacgcgtcaccatctcaaaggacaactctaagaatcaggtgtcactgaaactgtcatctgtgaccgcagccgacaccgccgtgtactattgcgctaagcattactattatggcgggagctacgcaatggattactggggacagggtactctggtcaccgtgtccagccaccaccatcatcaccatcaccat

SEQ ID NO: 945 - protein, 271 aa, synthetic construct
  REGION 1..271: note = Description of Artificial Sequence: Synthetic polypeptide
MALPVTALLLPLALLLHAARPEIVMTQSPATLSLSPGERATLSCRASQDISKYLNWYQQKPGQAPRLLIYHTSRLHSGIPARFSGSGSGTDYTLTISSLQPEDFAVYFCQQGNTLPYTFGQGTKLEIKGGGGSGGGGSGGGGSQVQLQESGPGLVKPSETLSLTCTVSGVSLPDYGVSWIRQPPGKGLEWIGVIWGSETTYYNSSLKSRVTISKDNSKNQVSLKLSSVTAADTAVYYCAKHYYYGGSYAMDYWGQGTLVTVSSHHHHHHHH

SEQ ID NO: 946 - DNA, 1473 bp, synthetic construct
  misc_feature 1..1473: note = Description of Artificial Sequence: Synthetic polynucleotide
  source 1..1473: mol_type = other DNA
atggctctgcccgtgaccgcactcctcctgccactggctctgctgcttcacgccgctcgcccacaagtccagcttcaagaatcagggcctggtctggtgaagccatctgagactctgtccctcacttgcaccgtgagcggagtgtccctcccagactacggagtgagctggattagacagcctcccggaaagggactggagtggatcggagtgatttggggtagcgaaaccacttactataactcttccctgaagtcacgggtcaccatttcaaaggataactcaaagaatcaagtgagcctcaagctctcatcagtcaccgccgctgacaccgccgtgtattactgtgccaagcattactactatggagggtcctacgccatggactactggggccagggaactctggtcactgtgtcatctggtggaggaggtagcggaggaggcgggagcggtggaggtggctccggaggtggcggaagcgaaatcgtgatgacccagagccctgcaaccctgtccctttctcccggggaacgggctaccctttcttgtcgggcatcacaagatatctcaaaatacctcaattggtatcaacagaagccgggacaggcccctaggcttcttatctaccacacctctcgcctgcatagcgggattcccgcacgctttagcgggtctggaagcgggaccgactacactctgaccatctcatctctccagcccgaggacttcgccgtctacttctgccagcagggtaacaccctgccgtacaccttcggccagggcaccaagcttgagatcaaaaccactactcccgctccaaggccacccacccctgccccgaccatcgcctctcagccgctttccctgcgtccggaggcatgtagacccgcagctggtggggccgtgcatacccggggtcttgacttcgcctgcgatatctacatttgggcccctctggctggtacttgcggggtcctgctgctttcactcgtgatcactctttactgtaagcgcggtcggaagaagctgctgtacatctttaagcaacccttcatgaggcctgtgcagactactcaagaggaggacggctgttcatgccggttcccagaggaggaggaaggcggctgcgaactgcgcgtgaaattcagccgcagcgcagatgctccagcctacaagcaggggcagaaccagctctacaacgaactcaatcttggtcggagagaggagtacgacgtgctggacaagcggagaggacgggacccagaaatgggcgggaagccgcgcagaaagaatccccaagagggcctgtacaacgagctccaaaaggataagatggcagaagcctatagcgagattggtatgaaaggggaacgcagaagaggcaaaggccacgacggactgtaccagggactcagcaccgccaccaaggacacctatgacgctcttcacatgcaggccctgccgcctcgg

SEQ ID NO: 947 - protein, 491 aa, synthetic construct
  REGION 1..491: note = Description of Artificial Sequence: Synthetic polypeptide
MALPVTALLLPLALLLHAARPQVQLQESGPGLVKPSETLSLTCTVSGVSLPDYGVSWIRQPPGKGLEWIGVIWGSETTYYNSSLKSRVTISKDNSKNQVSLKLSSVTAADTAVYYCAKHYYYGGSYAMDYWGQGTLVTVSSGGGGSGGGGSGGGGSGGGGSEIVMTQSPATLSLSPGERATLSCRASQDISKYLNWYQQKPGQAPRLLIYHTSRLHSGIPARFSGSGSGTDYTLTISSLQPEDFAVYFCQQGNTLPYTFGQGTKLEIKTTTPAPRPPTPAPTIASQPLSLRPEACRPAAGGAVHTRGLDFACDIYIWAPLAGTCGVLLLSLVITLYCKRGRKKLLYIFKQPFMRPVQTTQEEDGCSCRFPEEEEGGCELRVKFSRSADAPAYKQGQNQLYNELNLGRREEYDVLDKRRGRDPEMGGKPRRKNPQEGLYNELQKDKMAEAYSEIGMKGERRRGKGHDGLYQGLSTATKDTYDALHMQALPPR

SEQ ID NO: 948 - protein, 242 aa, synthetic construct; identical to SEQ ID NO: 883
  REGION 1..242: note = Description of Artificial Sequence: Synthetic polypeptide

SEQ ID NO: 949 - DNA, 813 bp, synthetic construct
  misc_feature 1..813: note = Description of Artificial Sequence: Synthetic polynucleotide
  source 1..813: mol_type = other DNA
atggctctgcccgtgaccgcactcctcctgccactggctctgctgcttcacgccgctcgcccacaagtccagcttcaagaatcagggcctggtctggtgaagccatctgagactctgtccctcacttgcaccgtgagcggagtgtccctcccagactacggagtgagctggattagacagcctcccggaaagggactggagtggatcggagtgatttggggtagcgaaaccacttactataactcttccctgaagtcacgggtcaccatttcaaaggataactcaaagaatcaagtgagcctcaagctctcatcagtcaccgccgctgacaccgccgtgtattactgtgccaagcattactactatggagggtcctacgccatggactactggggccagggaactctggtcactgtgtcatctggtggaggaggtagcggaggaggcgggagcggtggaggtggctccgaaatcgtgatgacccagagccctgcaaccctgtccctttctcccggggaacgggctaccctttcttgtcgggcatcacaagatatctcaaaatacctcaattggtatcaacagaagccgggacaggcccctaggcttcttatctaccacacctctcgcctgcatagcgggattcccgcacgctttagcgggtctggaagcgggaccgactacactctgaccatctcatctctccagcccgaggacttcgccgtctacttctgccagcagggtaacaccctgccgtacaccttcggccagggcaccaagcttgagatcaaacatcaccaccatcatcaccatcac

SEQ ID NO: 950 - protein, 271 aa, synthetic construct
  REGION 1..271: note = Description of Artificial Sequence: Synthetic polypeptide
MALPVTALLLPLALLLHAARPQVQLQESGPGLVKPSETLSLTCTVSGVSLPDYGVSWIRQPPGKGLEWIGVIWGSETTYYNSSLKSRVTISKDNSKNQVSLKLSSVTAADTAVYYCAKHYYYGGSYAMDYWGQGTLVTVSSGGGGSGGGGSGGGGSEIVMTQSPATLSLSPGERATLSCRASQDISKYLNWYQQKPGQAPRLLIYHTSRLHSGIPARFSGSGSGTDYTLTISSLQPEDFAVYFCQQGNTLPYTFGQGTKLEIKHHHHHHHH

SEQ ID NO: 951 - DNA, 1458 bp, synthetic construct
  misc_feature 1..1458: note = Description of Artificial Sequence: Synthetic polynucleotide
  source 1..1458: mol_type = other DNA
atggccctccctgtcaccgccctgctgcttccgctggctcttctgctccacgccgctcggcccgaaattgtgatgacccagtcacccgccactcttagcctttcacccggtgagcgcgcaaccctgtcttgcagagcctcccaagacatctcaaaataccttaattggtatcaacagaagcccggacaggctcctcgccttctgatctaccacaccagccggctccattctggaatccctgccaggttcagcggtagcggatctgggaccgactacaccctcactatcagctcactgcagccagaggacttcgctgtctatttctgtcagcaagggaacaccctgccctacacctttggacagggcaccaagctcgagattaaaggtggaggtggcagcggaggaggtgggtccggcggtggaggaagccaggtccaactccaagaaagcggaccgggtcttgtgaagccatcagaaactctttcactgacttgtactgtgagcggagtgtctctccccgattacggggtgtcttggatcagacagccaccggggaagggtctggaatggattggagtgatttggggctctgagactacttactacaactcatccctcaagtcacgcgtcaccatctcaaaggacaactctaagaatcaggtgtcactgaaactgtcatctgtgaccgcagccgacaccgccgtgtactattgcgctaagcattactattatggcgggagctacgcaatggattactggggacagggtactctggtcaccgtgtccagcaccactaccccagcaccgaggccacccaccccggctcctaccatcgcctcccagcctctgtccctgcgtccggaggcatgtagacccgcagctggtggggccgtgcatacccggggtcttgacttcgcctgcgatatctacatttgggcccctctggctggtacttgcggggtcctgctgctttcactcgtgatcactctttactgtaagcgcggtcggaagaagctgctgtacatctttaagcaacccttcatgaggcctgtgcagactactcaagaggaggacggctgttcatgccggttcccagaggaggaggaaggcggctgcgaactgcgcgtgaaattcagccgcagcgcagatgctccagcctacaagcaggggcagaaccagctctacaacgaactcaatcttggtcggagagaggagtacgacgtgctggacaagcggagaggacgggacccagaaatgggcgggaagccgcgcagaaagaatccccaagagggcctgtacaacgagctccaaaaggataagatggcagaagcctatagcgagattggtatgaaaggggaacgcagaagaggcaaaggccacgacggactgtaccagggactcagcaccgccaccaaggacacctatgacgctcttcacatgcaggccctgccgcctcgg

SEQ ID NO: 952 - protein, 486 aa, synthetic construct
  REGION 1..486: note = Description of Artificial Sequence: Synthetic polypeptide
MALPVTALLLPLALLLHAARPEIVMTQSPATLSLSPGERATLSCRASQDISKYLNWYQQKPGQAPRLLIYHTSRLHSGIPARFSGSGSGTDYTLTISSLQPEDFAVYFCQQGNTLPYTFGQGTKLEIKGGGGSGGGGSGGGGSQVQLQESGPGLVKPSETLSLTCTVSGVSLPDYGVSWIRQPPGKGLEWIGVIWGSETTYYNSSLKSRVTISKDNSKNQVSLKLSSVTAADTAVYYCAKHYYYGGSYAMDYWGQGTLVTVSSTTTPAPRPPTPAPTIASQPLSLRPEACRPAAGGAVHTRGLDFACDIYIWAPLAGTCGVLLLSLVITLYCKRGRKKLLYIFKQPFMRPVQTTQEEDGCSCRFPEEEEGGCELRVKFSRSADAPAYKQGQNQLYNELNLGRREEYDVLDKRRGRDPEMGGKPRRKNPQEGLYNELQKDKMAEAYSEIGMKGERRRGKGHDGLYQGLSTATKDTYDALHMQALPPR

SEQ ID NO: 953 - DNA, 813 bp, synthetic construct
  misc_feature 1..813: note = Description of Artificial Sequence: Synthetic polynucleotide
  source 1..813: mol_type = other DNA
atggccctgcccgtcaccgctctgctgctgccccttgctctgcttcttcatgcagcaaggccggacatccagatgacccaaaccacctcatccctctctgcctctcttggagacagggtgaccatttcttgtcgcgccagccaggacatcagcaagtatctgaactggtatcagcagaagccggacggaaccgtgaagctcctgatctaccatacctctcgcctgcatagcggcgtgccctcacgcttctctggaagcggatcaggaaccgattattctctcactatttcaaatcttgagcaggaagatattgccacctatttctgccagcagggtaataccctgccctacaccttcggaggagggaccaagctcgaaatcaccggtggaggaggcagcggcggtggagggtctggtggaggtggttctgaggtgaagctgcaagaatcaggccctggacttgtggccccttcacagtccctgagcgtgacttgcaccgtgtccggagtctccctgcccgactacggagtgtcatggatcagacaacctccacggaaaggactggaatggctcggtgtcatctggggtagcgaaactacttactacaattcagccctcaaaagcaggctgactattatcaaggacaacagcaagtcccaagtctttcttaagatgaactcactccagactgacgacaccgcaatctactattgtgctaagcactactactacggaggatcctacgctatggattactggggacaaggtacttccgtcactgtctcttcacaccatcatcaccatcaccatcac

SEQ ID NO: 954 - protein, 271 aa, synthetic construct
  REGION 1..271: note = Description of Artificial Sequence: Synthetic polypeptide
MALPVTALLLPLALLLHAARPDIQMTQTTSSLSASLGDRVTISCRASQDISKYLNWYQQKPDGTVKLLIYHTSRLHSGVPSRFSGSGSGTDYSLTISNLEQEDIATYFCQQGNTLPYTFGGGTKLEITGGGGSGGGGSGGGGSEVKLQESGPGLVAPSQSLSVTCTVSGVSLPDYGVSWIRQPPRKGLEWLGVIWGSETTYYNSALKSRLTIIKDNSKSQVFLKMNSLQTDDTAIYYCAKHYYYGGSYAMDYWGQGTSVTVSSHHHHHHHH

SEQ ID NO: 955 - DNA, 1458 bp, synthetic construct
  misc_feature 1..1458: note = Description of Artificial Sequence: Synthetic polynucleotide
  source 1..1458: mol_type = other DNA
atggccttaccagtgaccgccttgctcctgccgctggccttgctgctccacgccgccaggccggacatccagatgacacagactacatcctccctgtctgcctctctgggagacagagtcaccatcagttgcagggcaagtcaggacattagtaaatatttaaattggtatcagcagaaaccagatggaactgttaaactcctgatctaccatacatcaagattacactcaggagtcccatcaaggttcagtggcagtgggtctggaacagattattctctcaccattagcaacctggagcaagaagatattgccacttacttttgccaacagggtaatacgcttccgtacacgttcggaggggggaccaagctggagatcacaggtggcggtggctcgggcggtggtgggtcgggtggcggcggatctgaggtgaaactgcaggagtcaggacctggcctggtggcgccctcacagagcctgtccgtcacatgcactgtctcaggggtctcattacccgactatggtgtaagctggattcgccagcctccacgaaagggtctggagtggctgggagtaatatggggtagtgaaaccacatactataattcagctctcaaatccagactgaccatcatcaaggacaactccaagagccaagttttcttaaaaatgaacagtctgcaaactgatgacacagccatttactactgtgccaaacattattactacggtggtagctatgctatggactactggggccaaggaacctcagtcaccgtctcctcaaccacgacgccagcgccgcgaccaccaacaccggcgcccaccatcgcgtcgcagcccctgtccctgcgcccagaggcgtgccggccagcggcggggggcgcagtgcacacgagggggctggacttcgcctgtgatatctacatctgggcgcccttggccgggacttgtggggtccttctcctgtcactggttatcaccctttactgcaaacggggcagaaagaaactcctgtatatattcaaacaaccatttatgagaccagtacaaactactcaagaggaagatggctgtagctgccgatttccagaagaagaagaaggaggatgtgaactgagagtgaagttcagcaggagcgcagacgcccccgcgtacaagcagggccagaaccagctctataacgagctcaatctaggacgaagagaggagtacgatgttttggacaagagacgtggccgggaccctgagatggggggaaagccgagaaggaagaaccctcaggaaggcctgtacaatgaactgcagaaagataagatggcggaggcctacagtgagattgggatgaaaggcgagcgccggaggggcaaggggcacgatggcctttaccagggtctcagtacagccaccaaggacacctacgacgcccttcacatgcaggccctgccccctcgc

SEQ ID NO: 956 - protein, 486 aa, synthetic construct; identical to SEQ ID NO: 891
  REGION 1..486: note = Description of Artificial Sequence: Synthetic polypeptide

SEQ ID NO: 957 - protein, 242 aa, synthetic construct; identical to SEQ ID NO: 884
  REGION 1..242: note = Description of Artificial Sequence: Synthetic polypeptide

SEQ ID NO: 958 - protein, 5 aa, synthetic construct
  REGION 1..5: note = Description of Artificial Sequence: Synthetic peptide
DYGVS

SEQ ID NO: 959 - protein, 16 aa, synthetic construct
  REGION 1..16: note = Description of Artificial Sequence: Synthetic peptide
VIWGSETTYYNSALKS

SEQ ID NO: 960 - protein, 12 aa, synthetic construct
  REGION 1..12: note = Description of Artificial Sequence: Synthetic peptide
HYYYGGSYAMDY

SEQ ID NO: 961 - protein, 16 aa, synthetic construct
  REGION 1..16: note = Description of Artificial Sequence: Synthetic peptide
VIWGSETTYYSSSLKS

SEQ ID NO: 962 - protein, 16 aa, synthetic construct
  REGION 1..16: note = Description of Artificial Sequence: Synthetic peptide
VIWGSETTYYQSSLKS

SEQ ID NO: 963 - protein, 16 aa, synthetic construct
  REGION 1..16: note = Description of Artificial Sequence: Synthetic peptide
VIWGSETTYYNSSLKS

SEQ ID NO: 964 - protein, 11 aa, synthetic construct
  REGION 1..11: note = Description of Artificial Sequence: Synthetic peptide
RASQDISKYLN

SEQ ID NO: 965 - protein, 7 aa, synthetic construct
  REGION 1..7: note = Description of Artificial Sequence: Synthetic peptide
HTSRLHS

SEQ ID NO: 966 - protein, 9 aa, synthetic construct
  REGION 1..9: note = Description of Artificial Sequence: Synthetic peptide
QQGNTLPYT

SEQ ID NO: 967 - protein, 239 aa, synthetic construct
  REGION 1..239: note = Description of Artificial Sequence: Synthetic polypeptide
EVQLVESGGGLVQPGGSLRLSCAVSGFALSNHGMSWVRRAPGKGLEWVSGIVYSGSTYYAASVKGRFTISRDNSRNTLYLQMNSLRPEDTAIYYCSAHGGESDVWGQGTTVTVSSASGGGGSGGRASGGGGSDIQLTQSPSSLSASVGDRVTITCRASQSISSYLNWYQQKPGKAPKLLIYAASSLQSGVPSRFSGSGSGTDFTLTISSLQPEDFATYYCQQSYSTPYTFGQGTKVEIK

SEQ ID NO: 968 - DNA, 717 bp, synthetic construct
  misc_feature 1..717: note = Description of Artificial Sequence: Synthetic polynucleotide
  source 1..717: mol_type = other DNA
gaagtgcaattggtggaatcagggggaggacttgtgcagcctggaggatcgctgagactgtcatgtgccgtgtccggctttgccctgtccaaccacgggatgtcctgggtccgccgcgcgcctggaaagggcctcgaatgggtgtcgggtattgtgtacagcggtagcacctactatgccgcatccgtgaaggggagattcaccatcagccgggacaactccaggaacactctgtacctccaaatgaattcgctgaggccagaggacactgccatctactactgctccgcgcatggcggagagtccgacgtctggggacaggggaccaccgtgaccgtgtctagcgcgtccggcggaggcggcagcgggggtcgggcatcagggggcggcggatcggacatccagctcacccagtccccgagctcgctgtccgcctccgtgggagatcgggtcaccatcacgtgccgcgccagccagtcgatttcctcctacctgaactggtaccaacagaagcccggaaaagccccgaagcttctcatctacgccgcctcgagcctgcagtcaggagtgccctcacggttctccggctccggttccggtactgatttcaccctgaccatttcctccctgcaaccggaggacttcgctacttactactgccagcagtcgtactccaccccctacactttcggacaaggcaccaaggtcgaaatcaag

SEQ ID NO: 969 - protein, 115 aa, synthetic construct
  REGION 1..115: note = Description of Artificial Sequence: Synthetic polypeptide
EVQLVESGGGLVQPGGSLRLSCAVSGFALSNHGMSWVRRAPGKGLEWVSGIVYSGSTYYAASVKGRFTISRDNSRNTLYLQMNSLRPEDTAIYYCSAHGGESDVWGQGTTVTVSS

SEQ ID NO: 970 - protein, 107 aa, synthetic construct
  REGION 1..107: note = Description of Artificial Sequence: Synthetic polypeptide
DIQLTQSPSSLSASVGDRVTITCRASQSISSYLNWYQQKPGKAPKLLIYAASSLQSGVPSRFSGSGSGTDFTLTISSLQPEDFATYYCQQSYSTPYTFGQGTKVEIK

SEQ ID NO: 971 - protein, 483 aa, synthetic construct
  REGION 1..483: note = Description of Artificial Sequence: Synthetic polypeptide
MALPVTALLLPLALLLHAARPEVQLVESGGGLVQPGGSLRLSCAVSGFALSNHGMSWVRRAPGKGLEWVSGIVYSGSTYYAASVKGRFTISRDNSRNTLYLQMNSLRPEDTAIYYCSAHGGESDVWGQGTTVTVSSASGGGGSGGRASGGGGSDIQLTQSPSSLSASVGDRVTITCRASQSISSYLNWYQQKPGKAPKLLIYAASSLQSGVPSRFSGSGSGTDFTLTISSLQPEDFATYYCQQSYSTPYTFGQGTKVEIKTTTPAPRPPTPAPTIASQPLSLRPEACRPAAGGAVHTRGLDFACDIYIWAPLAGTCGVLLLSLVITLYCKRGRKKLLYIFKQPFMRPVQTTQEEDGCSCRFPEEEEGGCELRVKFSRSADAPAYKQGQNQLYNELNLGRREEYDVLDKRRGRDPEMGGKPRRKNPQEGLYNELQKDKMAEAYSEIGMKGERRRGKGHDGLYQGLSTATKDTYDALHMQALPPR

SEQ ID NO: 972 - DNA, 1449 bp, synthetic construct
  misc_feature 1..1449: note = Description of Artificial Sequence: Synthetic polynucleotide
  source 1..1449: mol_type = other DNA
atggccctccctgtcaccgccctgctgcttccgctggctcttctgctccacgccgctcggcccgaagtgcaattggtggaatcagggggaggacttgtgcagcctggaggatcgctgagactgtcatgtgccgtgtccggctttgccctgtccaaccacgggatgtcctgggtccgccgcgcgcctggaaagggcctcgaatgggtgtcgggtattgtgtacagcggtagcacctactatgccgcatccgtgaaggggagattcaccatcagccgggacaactccaggaacactctgtacctccaaatgaattcgctgaggccagaggacactgccatctactactgctccgcgcatggcggagagtccgacgtctggggacaggggaccaccgtgaccgtgtctagcgcgtccggcggaggcggcagcgggggtcgggcatcagggggcggcggatcggacatccagctcacccagtccccgagctcgctgtccgcctccgtgggagatcgggtcaccatcacgtgccgcgccagccagtcgatttcctcctacctgaactggtaccaacagaagcccggaaaagccccgaagcttctcatctacgccgcctcgagcctgcagtcaggagtgccctcacggttctccggctccggttccggtactgatttcaccctgaccatttcctccctgcaaccggaggacttcgctacttactactgccagcagtcgtactccaccccctacactttcggacaaggcaccaaggtcgaaatcaagaccactaccccagcaccgaggccacccaccccggctcctaccatcgcctcccagcctctgtccctgcgtccggaggcatgtagacccgcagctggtggggccgtgcatacccggggtcttgacttcgcctgcgatatctacatttgggcccctctggctggtacttgcggggtcctgctgctttcactcgtgatcactctttactgtaagcgcggtcggaagaagctgctgtacatctttaagcaacccttcatgaggcctgtgcagactactcaagaggaggacggctgttcatgccggttcccagaggaggaggaaggcggctgcgaactgcgcgtgaaattcagccgcagcgcagatgctccagcctacaagcaggggcagaaccagctctacaacgaactcaatcttggtcggagagaggagtacgacgtgctggacaagcggagaggacgggacccagaaatgggcgggaagccgcgcagaaagaatccccaagagggcctgtacaacgagctccaaaaggataagatggcagaagcctatagcgagattggtatgaaaggggaacgcagaagaggcaaaggccacgacggactgtaccagggactcagcaccgccaccaaggacacctatgacgctcttcacatgcaggccctgccgcctcgg

SEQ ID NO: 973 - protein, 246 aa, synthetic construct
  REGION 1..246: note = Description of Artificial Sequence: Synthetic polypeptide
QVQLVESGGGLVQPGRSLRLSCAASGFTFSNYAMSWVRQAPGKGLGWVSGISRSGENTYYADSVKGRFTISRDNSKNTLYLQMNSLRDEDTAVYYCARSPAHYYGGMDVWGQGTTVTVSSASGGGGSGGRASGGGGSDIVLTQSPGTLSLSPGERATLSCRASQSISSSFLAWYQQKPGQAPRLLIYGASRRATGIPDRFSGSGSGTDFTLTISRLEPEDSAVYYCQQYHSSPSWTFGQGTKLEIK

SEQ ID NO: 974 - DNA, 738 bp, synthetic construct
  misc_feature 1..738: note = Description of Artificial Sequence: Synthetic polynucleotide
  source 1..738: mol_type = other DNA
caagtgcaactcgtggaatctggtggaggactcgtgcaacccggaagatcgcttagactgtcgtgtgccgccagcgggttcactttctcgaactacgcgatgtcctgggtccgccaggcacccggaaagggactcggttgggtgtccggcatttcccggtccggcgaaaatacctactacgccgactccgtgaagggccgcttcaccatctcaagggacaacagcaaaaacaccctgtacttgcaaatgaactccctgcgggatgaagatacagccgtgtactattgcgcccggtcgcctgcccattactacggcggaatggacgtctggggacagggaaccactgtgactgtcagcagcgcgtcgggtggcggcggctcagggggtcgggcctccggggggggagggtccgacatcgtgctgacccagtccccgggaaccctgagcctgagcccgggagagcgcgcgaccctgtcatgccgggcatcccagagcattagctcctcctttctcgcctggtatcagcagaagcccggacaggccccgaggctgctgatctacggcgctagcagaagggctaccggaatcccagaccggttctccggctccggttccgggaccgatttcacccttactatctcgcgcctggaacctgaggactccgccgtctactactgccagcagtaccactcatccccgtcgtggacgttcggacagggcaccaagctggagattaag

SEQ ID NO: 975 - protein, 120 aa, synthetic construct
  REGION 1..120: note = Description of Artificial Sequence: Synthetic polypeptide
QVQLVESGGGLVQPGRSLRLSCAASGFTFSNYAMSWVRQAPGKGLGWVSGISRSGENTYYADSVKGRFTISRDNSKNTLYLQMNSLRDEDTAVYYCARSPAHYYGGMDVWGQGTTVTVSS

SEQ ID NO: 976 - protein, 109 aa, synthetic construct
  REGION 1..109: note = Description of Artificial Sequence: Synthetic polypeptide
DIVLTQSPGTLSLSPGERATLSCRASQSISSSFLAWYQQKPGQAPRLLIYGASRRATGIPDRFSGSGSGTDFTLTISRLEPEDSAVYYCQQYHSSPSWTFGQGTKLEIK

SEQ ID NO: 977 - protein, 490 aa, synthetic construct
  REGION 1..490: note = Description of Artificial Sequence: Synthetic polypeptide
MALPVTALLLPLALLLHAARPQVQLVESGGGLVQPGRSLRLSCAASGFTFSNYAMSWVRQAPGKGLGWVSGISRSGENTYYADSVKGRFTISRDNSKNTLYLQMNSLRDEDTAVYYCARSPAHYYGGMDVWGQGTTVTVSSASGGGGSGGRASGGGGSDIVLTQSPGTLSLSPGERATLSCRASQSISSSFLAWYQQKPGQAPRLLIYGASRRATGIPDRFSGSGSGTDFTLTISRLEPEDSAVYYCQQYHSSPSWTFGQGTKLEIKTTTPAPRPPTPAPTIASQPLSLRPEACRPAAGGAVHTRGLDFACDIYIWAPLAGTCGVLLLSLVITLYCKRGRKKLLYIFKQPFMRPVQTTQEEDGCSCRFPEEEEGGCELRVKFSRSADAPAYKQGQNQLYNELNLGRREEYDVLDKRRGRDPEMGGKPRRKNPQEGLYNELQKDKMAEAYSEIGMKGERRRGKGHDGLYQGLSTATKDTYDALHMQALPPR

SEQ ID NO: 978 - DNA, 1470 bp, synthetic construct
  misc_feature 1..1470: note = Description of Artificial Sequence: Synthetic polynucleotide
  source 1..1470: mol_type = other DNA
atggccctccctgtcaccgccctgctgcttccgctggctcttctgctccacgccgctcggccccaagtgcaactcgtggaatctggtggaggactcgtgcaacccggaagatcgcttagactgtcgtgtgccgccagcgggttcactttctcgaactacgcgatgtcctgggtccgccaggcacccggaaagggactcggttgggtgtccggcatttcccggtccggcgaaaatacctactacgccgactccgtgaagggccgcttcaccatctcaagggacaacagcaaaaacaccctgtacttgcaaatgaactccctgcgggatgaagatacagccgtgtactattgcgcccggtcgcctgcccattactacggcggaatggacgtctggggacagggaaccactgtgactgtcagcagcgcgtcgggtggcggcggctcagggggtcgggcctccggggggggagggtccgacatcgtgctgacccagtccccgggaaccctgagcctgagcccgggagagcgcgcgaccctgtcatgccgggcatcccagagcattagctcctcctttctcgcctggtatcagcagaagcccggacaggccccgaggctgctgatctacggcgctagcagaagggctaccggaatcccagaccggttctccggctccggttccgggaccgatttcacccttactatctcgcgcctggaacctgaggactccgccgtctactactgccagcagtaccactcatccccgtcgtggacgttcggacagggcaccaagctggagattaagaccactaccccagcaccgaggccacccaccccggctcctaccatcgcctcccagcctctgtccctgcgtccggaggcatgtagacccgcagctggtggggccgtgcatacccggggtcttgacttcgcctgcgatatctacatttgggcccctctggctggtacttgcggggtcctgctgctttcactcgtgatcactctttactgtaagcgcggtcggaagaagctgctgtacatctttaagcaacccttcatgaggcctgtgcagactactcaagaggaggacggctgttcatgccggttcccagaggaggaggaaggcggctgcgaactgcgcgtgaaattcagccgcagcgcagatgctccagcctacaagcaggggcagaaccagctctacaacgaactcaatcttggtcggagagaggagtacgacgtgctggacaagcggagaggacgggacccagaaatgggcgggaagccgcgcagaaagaatccccaagagggcctgtacaacgagctccaaaaggataagatggcagaagcctatagcgagattggtatgaaaggggaacgcagaagaggcaaaggccacgacggactgtaccagggactcagcaccgccaccaaggacacctatgacgctcttcacatgcaggccctgccgcctcgg

SEQ ID NO: 979 - protein, 244 aa, synthetic construct
  REGION 1..244: note = Description of Artificial Sequence: Synthetic polypeptide
QVQLVESGGGLVQPGRSLRLSCAASGFTFDDYAMHWVRQAPGKGLEWVSGISWNSGSIGYADSVKGRFTISRDNAKNSLYLQMNSLRAEDTALYYCSVHSFLAYWGQGTLVTVSSASGGGGSGGRASGGGGSDIVMTQTPLSLPVTPGEPASISCRSSQSLLHSNGYNYLDWYLQKPGQSPQLLIYLGSNRASGVPDRFSGSGSGTDFTLKISRVEAEDVGVYYCMQALQTPYTFGQGTKVEIK

SEQ ID NO: 980 - DNA, 732 bp, synthetic construct
  misc_feature 1..732: note = Description of Artificial Sequence: Synthetic polynucleotide
  source 1..732: mol_type = other DNA
caagtgcaactcgtcgaatccggtggaggtctggtccaacctggtagaagcctgagactgtcgtgtgcggccagcggattcacctttgatgactatgctatgcactgggtgcggcaggccccaggaaagggcctggaatgggtgtcgggaattagctggaactccgggtccattggctacgccgactccgtgaagggccgcttcaccatctcccgcgacaacgcaaagaactccctgtacttgcaaatgaactcgctcagggctgaggataccgcgctgtactactgctccgtgcattccttcctggcctactggggacagggaactctggtcaccgtgtcgagcgcctccggcggcgggggctcgggtggacgggcctcgggcggaggggggtccgacatcgtgatgacccagaccccgctgagcttgcccgtgactcccggagagcctgcatccatctcctgccggtcatcccagtcccttctccactccaacggatacaactacctcgactggtacctccagaagccgggacagagccctcagcttctgatctacctggggtcaaatagagcctcaggagtgccggatcggttcagcggatctggttcgggaactgatttcactctgaagatttcccgcgtggaagccgaggacgtgggcgtctactactgtatgcaggcgctgcagaccccctataccttcggccaagggacgaaagtggagatcaag

SEQ ID NO: 981 - protein, 115 aa, synthetic construct
  REGION 1..115: note = Description of Artificial Sequence: Synthetic polypeptide
QVQLVESGGGLVQPGRSLRLSCAASGFTFDDYAMHWVRQAPGKGLEWVSGISWNSGSIGYADSVKGRFTISRDNAKNSLYLQMNSLRAEDTALYYCSVHSFLAYWGQGTLVTVSS

SEQ ID NO: 982 - protein, 112 aa, synthetic construct
  REGION 1..112: note = Description of Artificial Sequence: Synthetic polypeptide
DIVMTQTPLSLPVTPGEPASISCRSSQSLLHSNGYNYLDWYLQKPGQSPQLLIYLGSNRASGVPDRFSGSGSGTDFTLKISRVEAEDVGVYYCMQALQTPYTFGQGTKVEIK

SEQ ID NO: 983 - protein, 488 aa, synthetic construct
  REGION 1..488: note = Description of Artificial Sequence: Synthetic polypeptide
MALPVTALLLPLALLLHAARPQVQLVESGGGLVQPGRSLRLSCAASGFTFDDYAMHWVRQAPGKGLEWVSGISWNSGSIGYADSVKGRFTISRDNAKNSLYLQMNSLRAEDTALYYCSVHSFLAYWGQGTLVTVSSASGGGGSGGRASGGGGSDIVMTQTPLSLPVTPGEPASISCRSSQSLLHSNGYNYLDWYLQKPGQSPQLLIYLGSNRASGVPDRFSGSGSGTDFTLKISRVEAEDVGVYYCMQALQTPYTFGQGTKVEIKTTTPAPRPPTPAPTIASQPLSLRPEACRPAAGGAVHTRGLDFACDIYIWAPLAGTCGVLLLSLVITLYCKRGRKKLLYIFKQPFMRPVQTTQEEDGCSCRFPEEEEGGCELRVKFSRSADAPAYKQGQNQLYNELNLGRREEYDVLDKRRGRDPEMGGKPRRKNPQEGLYNELQKDKMAEAYSEIGMKGERRRGKGHDGLYQGLSTATKDTYDALHMQALPPR

SEQ ID NO: 984 - DNA, 1464 bp, synthetic construct
  misc_feature 1..1464: note = Description of Artificial Sequence: Synthetic polynucleotide
  source 1..1464: mol_type = other DNA
atggccctccctgtcaccgccctgctgcttccgctggctcttctgctccacgccgctcggccccaagtgcaactcgtcgaatccggtggaggtctggtccaacctggtagaagcctgagactgtcgtgtgcggccagcggattcacctttgatgactatgctatgcactgggtgcggcaggccccaggaaagggcctggaatgggtgtcgggaattagctggaactccgggtccattggctacgccgactccgtgaagggccgcttcaccatctcccgcgacaacgcaaagaactccctgtacttgcaaatgaactcgctcagggctgaggataccgcgctgtactactgctccgtgcattccttcctggcctactggggacagggaactctggtcaccgtgtcgagcgcctccggcggcgggggctcgggtggacgggcctcgggcggaggggggtccgacatcgtgatgacccagaccccgctgagcttgcccgtgactcccggagagcctgcatccatctcctgccggtcatcccagtcccttctccactccaacggatacaactacctcgactggtacctccagaagccgggacagagccctcagcttctgatctacctggggtcaaatagagcctcaggagtgccggatcggttcagcggatctggttcgggaactgatttcactctgaagatttcccgcgtggaagccgaggacgtgggcgtctactactgtatgcaggcgctgcagaccccctataccttcggccaagggacgaaagtggagatcaagaccactaccccagcaccgaggccacccaccccggctcctaccatcgcctcccagcctctgtccctgcgtccggaggcatgtagacccgcagctggtggggccgtgcatacccggggtcttgacttcgcctgcgatatctacatttgggcccctctggctggtacttgcggggtcctgctgctttcactcgtgatcactctttactgtaagcgcggtcggaagaagctgctgtacatctttaagcaacccttcatgaggcctgtgcagactactcaagaggaggacggctgttcatgccggttcccagaggaggaggaaggcggctgcgaactgcgcgtgaaattcagccgcagcgcagatgctccagcctacaagcaggggcagaaccagctctacaacgaactcaatcttggtcggagagaggagtacgacgtgctggacaagcggagaggacgggacccagaaatgggcgggaagccgcgcagaaagaatccccaagagggcctgtacaacgagctccaaaaggataagatggcagaagcctatagcgagattggtatgaaaggggaacgcagaagaggcaaaggccacgacggactgtaccagggactcagcaccgccaccaaggacacctatgacgctcttcacatgcaggccctgccgcctcgg

SEQ ID NO: 985 - protein, 243 aa, synthetic construct
  REGION 1..243: note = Description of Artificial Sequence: Synthetic polypeptide
EVQLLESGGGLVQPGGSLRLSCAVSGFALSNHGMSWVRRAPGKGLEWVSGIVYSGSTYYAASVKGRFTISRDNSRNTLYLQMNSLRPEDTAIYYCSAHGGESDVWGQGTTVTVSSASGGGGSGGRASGGGGSDIVMTQTPLSLSVTPGQPASISCKSSQSLLRNDGKTPLYWYLQKAGQPPQLLIYEVSNRFSGVPDRFSGSGSGTDFTLKISRVEAEDVGAYYCMQNIQFPSFGGGTKLEIK

SEQ ID NO: 986 - DNA, 729 bp, synthetic construct
  misc_feature 1..729: note = Description of Artificial Sequence: Synthetic polynucleotide
  source 1..729: mol_type = other DNA
gaagtgcaattgttggaatctggaggaggacttgtgcagcctggaggatcactgagactttcgtgtgcggtgtcaggcttcgccctgagcaaccacggcatgagctgggtgcggagagccccggggaagggtctggaatgggtgtccgggatcgtctactccggttcaacttactacgccgcaagcgtgaagggtcgcttcaccatttcccgcgataactcccggaacaccctgtacctccaaatgaactccctgcggcccgaggacaccgccatctactactgttccgcgcatggaggagagtccgatgtctggggacagggcactaccgtgaccgtgtcgagcgcctcggggggaggaggctccggcggtcgcgcctccggggggggtggcagcgacattgtgatgacgcagactccactctcgctgtccgtgaccccgggacagcccgcgtccatctcgtgcaagagctcccagagcctgctgaggaacgacggaaagactcctctgtattggtacctccagaaggctggacagcccccgcaactgctcatctacgaagtgtcaaatcgcttctccggggtgccggatcggttttccggctcgggatcgggcaccgacttcaccctgaaaatctccagggtcgaggccgaggacgtgggagcctactactgcatgcaaaacatccagttcccttccttcggcggcggcacaaagctggagattaag

SEQ ID NO: 987 - protein, 115 aa, synthetic construct
  REGION 1..115: note = Description of Artificial Sequence: Synthetic polypeptide
EVQLLESGGGLVQPGGSLRLSCAVSGFALSNHGMSWVRRAPGKGLEWVSGIVYSGSTYYAASVKGRFTISRDNSRNTLYLQMNSLRPEDTAIYYCSAHGGESDVWGQGTTVTVSS

SEQ ID NO: 988 - protein, 111 aa, synthetic construct
  REGION 1..111: note = Description of Artificial Sequence: Synthetic polypeptide
DIVMTQTPLSLSVTPGQPASISCKSSQSLLRNDGKTPLYWYLQKAGQPPQLLIYEVSNRFSGVPDRFSGSGSGTDFTLKISRVEAEDVGAYYCMQNIQFPSFGGGTKLEIK

SEQ ID NO: 989 - protein, 487 aa, synthetic construct
  REGION 1..487: note = Description of Artificial Sequence: Synthetic polypeptide
MALPVTALLLPLALLLHAARPEVQLLESGGGLVQPGGSLRLSCAVSGFALSNHGMSWVRRAPGKGLEWVSGIVYSGSTYYAASVKGRFTISRDNSRNTLYLQMNSLRPEDTAIYYCSAHGGESDVWGQGTTVTVSSASGGGGSGGRASGGGGSDIVMTQTPLSLSVTPGQPASISCKSSQSLLRNDGKTPLYWYLQKAGQPPQLLIYEVSNRFSGVPDRFSGSGSGTDFTLKISRVEAEDVGAYYCMQNIQFPSFGGGTKLEIKTTTPAPRPPTPAPTIASQPLSLRPEACRPAAGGAVHTRGLDFACDIYIWAPLAGTCGVLLLSLVITLYCKRGRKKLLYIFKQPFMRPVQTTQEEDGCSCRFPEEEEGGCELRVKFSRSADAPAYKQGQNQLYNELNLGRREEYDVLDKRRGRDPEMGGKPRRKNPQEGLYNELQKDKMAEAYSEIGMKGERRRGKGHDGLYQGLSTATKDTYDALHMQALPPR

SEQ ID NO: 990 - DNA, 1461 bp, synthetic construct
  misc_feature 1..1461: note = Description of Artificial Sequence: Synthetic polynucleotide
  source 1..1461: mol_type = other DNA
atggccctccctgtcaccgccctgctgcttccgctggctcttctgctccacgccgctcggcccgaagtgcaattgttggaatctggaggaggacttgtgcagcctggaggatcactgagactttcgtgtgcggtgtcaggcttcgccctgagcaaccacggcatgagctgggtgcggagagccccggggaagggtctggaatgggtgtccgggatcgtctactccggttcaacttactacgccgcaagcgtgaagggtcgcttcaccatttcccgcgataactcccggaacaccctgtacctccaaatgaactccctgcggcccgaggacaccgccatctactactgttccgcgcatggaggagagtccgatgtctggggacagggcactaccgtgaccgtgtcgagcgcctcggggggaggaggctccggcggtcgcgcctccggggggggtggcagcgacattgtgatgacgcagactccactctcgctgtccgtgaccccgggacagcccgcgtccatctcgtgcaagagctcccagagcctgctgaggaacgacggaaagactcctctgtattggtacctccagaaggctggacagcccccgcaactgctcatctacgaagtgtcaaatcgcttctccggggtgccggatcggttttccggctcgggatcgggcaccgacttcaccctgaaaatctccagggtcgaggccgaggacgtgggagcctactactgcatgcaaaacatccagttcccttccttcggcggcggcacaaagctggagattaagaccactaccccagcaccgaggccacccaccccggctcctaccatcgcctcccagcctctgtccctgcgtccggaggcatgtagacccgcagctggtggggccgtgcatacccggggtcttgacttcgcctgcgatatctacatttgggcccctctggctggtacttgcggggtcctgctgctttcactcgtgatcactctttactgtaagcgcggtcggaagaagctgctgtacatctttaagcaacccttcatgaggcctgtgcagactactcaagaggaggacggctgttcatgccggttcccagaggaggaggaaggcggctgcgaactgcgcgtgaaattcagccgcagcgcagatgctccagcctacaagcaggggcagaaccagctctacaacgaactcaatcttggtcggagagaggagtacgacgtgctggacaagcggagaggacgggacccagaaatgggcgggaagccgcgcagaaagaatccccaagagggcctgtacaacgagctccaaaaggataagatggcagaagcctatagcgagattggtatgaaaggggaacgcagaagaggcaaaggccacgacggactgtaccagggactcagcaccgccaccaaggacacctatgacgctcttcacatgcaggccctgccgcctcgg

SEQ ID NO: 991 - protein, 249 aa, synthetic construct
  REGION 1..249: note = Description of Artificial Sequence: Synthetic polypeptide
QVQLVQSGAEVRKTGASVKVSCKASGYIFDNFGINWVRQAPGQGLEWMGWINPKNNNTNYAQKFQGRVTITADESTNTAYMEVSSLRSEDTAVYYCARGPYYYQSYMDVWGQGTMVTVSSASGGGGSGGRASGGGGSDIVMTQTPLSLPVTPGEPASISCRSSQSLLHSNGYNYLNWYLQKPGQSPQLLIYLGSKRASGVPDRFSGSGSGTDFTLHITRVGAEDVGVYYCMQALQTPYTFGQGTKLEIK

SEQ ID NO: 992 - DNA, 747 bp, synthetic construct
  misc_feature 1..747: note = Description of Artificial Sequence: Synthetic polynucleotide
  source 1..747: mol_type = other DNA
caagtccaactcgtccagtccggcgcagaagtcagaaaaaccggtgctagcgtgaaagtgtcctgcaaggcctccggctacattttcgataacttcggaatcaactgggtcagacaggccccgggccaggggctggaatggatgggatggatcaaccccaagaacaacaacaccaactacgcacagaagttccagggccgcgtgactatcaccgccgatgaatcgaccaataccgcctacatggaggtgtcctccctgcggtcggaggacactgccgtgtattactgcgcgaggggcccatactactaccaaagctacatggacgtctggggacagggaaccatggtgaccgtgtcatccgcctccggtggtggaggctccggggggcgggcttcaggaggcggaggaagcgatattgtgatgacccagactccgcttagcctgcccgtgactcctggagaaccggcctccatttcctgccggtcctcgcaatcactcctgcattccaacggttacaactacctgaattggtacctccagaagcctggccagtcgccccagttgctgatctatctgggctcgaagcgcgcctccggggtgcctgaccggtttagcggatctgggagcggcacggacttcactctccacatcacccgcgtgggagcggaggacgtgggagtgtactactgtatgcaggcgctgcagactccgtacacattcggacagggcaccaagctggagatcaag

SEQ ID NO: 993 - protein, 120 aa, synthetic construct
  REGION 1..120: note = Description of Artificial Sequence: Synthetic polypeptide
QVQLVQSGAEVRKTGASVKVSCKASGYIFDNFGINWVRQAPGQGLEWMGWINPKNNNTNYAQKFQGRVTITADESTNTAYMEVSSLRSEDTAVYYCARGPYYYQSYMDVWGQGTMVTVSS

SEQ ID NO: 994 - protein, 112 aa, synthetic construct
  REGION 1..112: note = Description of Artificial Sequence: Synthetic polypeptide
DIVMTQTPLSLPVTPGEPASISCRSSQSLLHSNGYNYLNWYLQKPGQSPQLLIYLGSKRASGVPDRFSGSGSGTDFTLHITRVGAEDVGVYYCMQALQTPYTFGQGTKLEIK

SEQ ID NO: 995 - protein, 493 aa, synthetic construct
  REGION 1..493: note = Description of Artificial Sequence: Synthetic polypeptide
MALPVTALLLPLALLLHAARPQVQLVQSGAEVRKTGASVKVSCKASGYIFDNFGINWVRQAPGQGLEWMGWINPKNNNTNYAQKFQGRVTITADESTNTAYMEVSSLRSEDTAVYYCARGPYYYQSYMDVWGQGTMVTVSSASGGGGSGGRASGGGGSDIVMTQTPLSLPVTPGEPASISCRSSQSLLHSNGYNYLNWYLQKPGQSPQLLIYLGSKRASGVPDRFSGSGSGTDFTLHITRVGAEDVGVYYCMQALQTPYTFGQGTKLEIKTTTPAPRPPTPAPTIASQPLSLRPEACRPAAGGAVHTRGLDFACDIYIWAPLAGTCGVLLLSLVITLYCKRGRKKLLYIFKQPFMRPVQTTQEEDGCSCRFPEEEEGGCELRVKFSRSADAPAYKQGQNQLYNELNLGRREEYDVLDKRRGRDPEMGGKPRRKNPQEGLYNELQKDKMAEAYSEIGMKGERRRGKGHDGLYQGLSTATKDTYDALHMQALPPR

SEQ ID NO: 996 - DNA, 1479 bp, synthetic construct
  misc_feature 1..1479: note = Description of Artificial Sequence: Synthetic polynucleotide
  source 1..1479: mol_type = other DNA
atggccctccctgtcaccgccctgctgcttccgctggctcttctgctccacgccgctcggccccaagtccaactcgtccagtccggcgcagaagtcagaaaaaccggtgctagcgtgaaagtgtcctgcaaggcctccggctacattttcgataacttcggaatcaactgggtcagacaggccccgggccaggggctggaatggatgggatggatcaaccccaagaacaacaacaccaactacgcacagaagttccagggccgcgtgactatcaccgccgatgaatcgaccaataccgcctacatggaggtgtcctccctgcggtcggaggacactgccgtgtattactgcgcgaggggcccatactactaccaaagctacatggacgtctggggacagggaaccatggtgaccgtgtcatccgcctccggtggtggaggctccggggggcgggcttcaggaggcggaggaagcgatattgtgatgacccagactccgcttagcctgcccgtgactcctggagaaccggcctccatttcctgccggtcctcgcaatcactcctgcattccaacggttacaactacctgaattggtacctccagaagcctggccagtcgccccagttgctgatctatctgggctcgaagcgcgcctccggggtgcctgaccggtttagcggatctgggagcggcacggacttcactctccacatcacccgcgtgggagcggaggacgtgggagtgtactactgtatgcaggcgctgcagactccgtacacattcggacagggcaccaagctggagatcaagaccactaccccagcaccgaggccacccaccccggctcctaccatcgcctcccagcctctgtccctgcgtccggaggcatgtagacccgcagctggtggggccgtgcatacccggggtcttgacttcgcctgcgatatctacatttgggcccctctggctggtacttgcggggtcctgctgctttcactcgtgatcactctttactgtaagcgcggtcggaagaagctgctgtacatctttaagcaacccttcatgaggcctgtgcagactactcaagaggaggacggctgttcatgccggttcccagaggaggaggaaggcggctgcgaactgcgcgtgaaattcagccgcagcgcagatgctccagcctacaagcaggggcagaaccagctctacaacgaactcaatcttggtcggagagaggagtacgacgtgctggacaagcggagaggacgggacccagaaatgggcgggaagccgcgcagaaagaatccccaagagggcctgtacaacgagctccaaaaggataagatggcagaagcctatagcgagattggtatgaaaggggaacgcagaagaggcaaaggccacgacggactgtaccagggactcagcaccgccaccaaggacacctatgacgctcttcacatgcaggccctgccgcctcgg

SEQ ID NO: 997 - protein, 246 aa, synthetic construct
  REGION 1..246: note = Description of Artificial Sequence: Synthetic polypeptide
QVQLQESGGGLVQPGGSLRLSCAASGFTFSSDAMTWVRQAPGKGLEWVSVISGSGGTTYYADSVKGRFTISRDNSKNTLYLQMNSLRAEDTAVYYCAKLDSSGYYYARGPRYWGQGTLVTVSSASGGGGSGGRASGGGGSDIQLTQSPSSLSASVGDRVTITCRASQSISSYLNWYQQKPGKAPKLLIYGASTLASGVPARFSGSGSGTHFTLTINSLQSEDSATYYCQQSYKRASFGQGTKVEIK

SEQ ID NO: 998 - DNA, 738 bp, synthetic construct
  misc_feature 1..738: note = Description of Artificial Sequence: Synthetic polynucleotide
  source 1..738: mol_type = other DNA
caagtgcaacttcaagaatcaggcggaggactcgtgcagcccggaggatcattgcggctctcgtgcgccgcctcgggcttcaccttctcgagcgacgccatgacctgggtccgccaggccccggggaaggggctggaatgggtgtctgtgatttccggctccgggggaactacgtactacgccgattccgtgaaaggtcgcttcactatctcccgggacaacagcaagaacaccctttatctgcaaatgaattccctccgcgccgaggacaccgccgtgtactactgcgccaagctggactcctcgggctactactatgcccggggtccgagatactggggacagggaaccctcgtgaccgtgtcctccgcgtccggcggaggagggtcgggagggcgggcctccggcggcggcggttcggacatccagctgacccagtccccatcctcactgagcgcaagcgtgggcgacagagtcaccattacatgcagggcgtcccagagcatcagctcctacctgaactggtaccaacagaagcctggaaaggctcctaagctgttgatctacggggcttcgaccctggcatccggggtgcccgcgaggtttagcggaagcggtagcggcactcacttcactctgaccattaacagcctccagtccgaggattcagccacttactactgtcagcagtcctacaagcgggccagcttcggacagggcactaaggtcgagatcaag

SEQ ID NO: 999 - protein, 123 aa, synthetic construct
  REGION 1..123: note = Description of Artificial Sequence: Synthetic polypeptide
QVQLQESGGGLVQPGGSLRLSCAASGFTFSSDAMTWVRQAPGKGLEWVSVISGSGGTTYYADSVKGRFTISRDNSKNTLYLQMNSLRAEDTAVYYCAKLDSSGYYYARGPRYWGQGTLVTVSS

SEQ ID NO: 1000 - protein, 106 aa, synthetic construct
  REGION 1..106: note = Description of Artificial Sequence: Synthetic polypeptide
DIQLTQSPSSLSASVGDRVTITCRASQSISSYLNWYQQKPGKAPKLLIYGASTLASGVPARFSGSGSGTHFTLTINSLQSEDSATYYCQQSYKRASFGQGTKVEIK

SEQ ID NO: 1001 - protein, 490 aa, synthetic construct
  REGION 1..490: note = Description of Artificial Sequence: Synthetic polypeptide
MALPVTALLLPLALLLHAARPQVQLQESGGGLVQPGGSLRLSCAASGFTFSSDAMTWVRQAPGKGLEWVSVISGSGGTTYYADSVKGRFTISRDNSKNTLYLQMNSLRAEDTAVYYCAKLDSSGYYYARGPRYWGQGTLVTVSSASGGGGSGGRASGGGGSDIQLTQSPSSLSASVGDRVTITCRASQSISSYLNWYQQKPGKAPKLLIYGASTLASGVPARFSGSGSGTHFTLTINSLQSEDSATYYCQQSYKRASFGQGTKVEIKTTTPAPRPPTPAPTIASQPLSLRPEACRPAAGGAVHTRGLDFACDIYIWAPLAGTCGVLLLSLVITLYCKRGRKKLLYIFKQPFMRPVQTTQEEDGCSCRFPEEEEGGCELRVKFSRSADAPAYKQGQNQLYNELNLGRREEYDVLDKRRGRDPEMGGKPRRKNPQEGLYNELQKDKMAEAYSEIGMKGERRRGKGHDGLYQGLSTATKDTYDALHMQALPPR

SEQ ID NO: 1002 - DNA, 1470 bp, synthetic construct
  misc_feature 1..1470: note = Description of Artificial Sequence: Synthetic polynucleotide
  source 1..1470: mol_type = other DNA
atggccctccctgtcaccgccctgctgcttccgctggctcttctgctccacgccgctcggccccaagtgcaacttcaagaatcaggcggaggactcgtgcagcccggaggatcattgcggctctcgtgcgccgcctcgggcttcaccttctcgagcgacgccatgacctgggtccgccaggccccggggaaggggctggaatgggtgtctgtgatttccggctccgggggaactacgtactacgccgattccgtgaaaggtcgcttcactatctcccgggacaacagcaagaacaccctttatctgcaaatgaattccctccgcgccgaggacaccgccgtgtactactgcgccaagctggactcctcgggctactactatgcccggggtccgagatactggggacagggaaccctcgtgaccgtgtcctccgcgtccggcggaggagggtcgggagggcgggcctccggcggcggcggttcggacatccagctgacccagtccccatcctcactgagcgcaagcgtgggcgacagagtcaccattacatgcagggcgtcccagagcatcagctcctacctgaactggtaccaacagaagcctggaaaggctcctaagctgttgatctacggggcttcgaccctggcatccggggtgcccgcgaggtttagcggaagcggtagcggcactcacttcactctgaccattaacagcctccagtccgaggattcagccacttactactgtcagcagtcctacaagcgggccagcttcggacagggcactaaggtcgagatcaagaccactaccccagcaccgaggccacccaccccggctcctaccatcgcctcccagcctctgtccctgcgtccggaggcatgtagacccgcagctggtggggccgtgcatacccggggtcttgacttcgcctgcgatatctacatttgggcccctctggctggtacttgcggggtcctgctgctttcactcgtgatcactctttactgtaagcgcggtcggaagaagctgctgtacatctttaagcaacccttcatgaggcctgtgcagactactcaagaggaggacggctgttcatgccggttcccagaggaggaggaaggcggctgcgaactgcgcgtgaaattcagccgcagcgcagatgctccagcctacaagcaggggcagaaccagctctacaacgaactcaatcttggtcggagagaggagtacgacgtgctggacaagcggagaggacgggacccagaaatgggcgggaagccgcgcagaaagaatccccaagagggcctgtacaacgagctccaaaaggataagatggcagaagcctatagcgagattggtatgaaaggggaacgcagaagaggcaaaggccacgacggactgtaccagggactcagcaccgccaccaaggacacctatgacgctcttcacatgcaggccctgccgcctcgg

SEQ ID NO: 1003 - protein, 247 aa, synthetic construct
  REGION 1..247: note = Description of Artificial Sequence: Synthetic polypeptide
QVQLVQSGAEVKKPGASVKVSCKASGYTFSNYGITWVRQAPGQGLEWMGWISAYNGNTNYAQKFQGRVTMTRNTSISTAYMELSSLRSEDTAVYYCARGPYYYYMDVWGKGTMVTVSSASGGGGSGGRASGGGGSEIVMTQSPLSLPVTPGEPASISCRSSQSLLYSNGYNYVDWYLQKPGQSPQLLIYLGSNRASGVPDRFSGSGSGTDFKLQISRVEAEDVGIYYCMQGRQFPYSFGQGTKVEIK

SEQ ID NO: 1004 - DNA, 741 bp, synthetic construct
  misc_feature 1..741: note = Description of Artificial Sequence: Synthetic polynucleotide
  source 1..741: mol_type = other DNA
caagtccaactggtccagagcggtgcagaagtgaagaagcccggagcgagcgtgaaagtgtcctgcaaggcttccgggtacaccttctccaactacggcatcacttgggtgcgccaggccccgggacagggcctggaatggatggggtggatttccgcgtacaacggcaatacgaactacgctcagaagttccagggtagagtgaccatgactaggaacacctccatttccaccgcctacatggaactgtcctccctgcggagcgaggacaccgccgtgtactattgcgcccggggaccatactactactacatggatgtctgggggaaggggactatggtcaccgtgtcatccgcctcgggaggcggcggatcaggaggacgcgcctctggtggtggaggatcggagatcgtgatgacccagagccctctctccttgcccgtgactcctggggagcccgcatccatttcatgccggagctcccagtcacttctctactccaacggctataactacgtggattggtacctccaaaagccgggccagagcccgcagctgctgatctacctgggctcgaacagggccagcggagtgcctgaccggttctccgggtcgggaagcgggaccgacttcaagctgcaaatctcgagagtggaggccgaggacgtgggaatctactactgtatgcagggccgccagtttccgtactcgttcggacagggcaccaaagtggaaatcaag

SEQ ID NO: 1005 - protein, 118 aa, synthetic construct
  REGION 1..118: note = Description of Artificial Sequence: Synthetic polypeptide
QVQLVQSGAEVKKPGASVKVSCKASGYTFSNYGITWVRQAPGQGLEWMGWISAYNGNTNYAQKFQGRVTMTRNTSISTAYMELSSLRSEDTAVYYCARGPYYYYMDVWGKGTMVTVSS

SEQ ID NO: 1006 - protein, 112 aa, synthetic construct
  REGION 1..112: note = Description of Artificial Sequence: Synthetic polypeptide
EIVMTQSPLSLPVTPGEPASISCRSSQSLLYSNGYNYVDWYLQKPGQSPQLLIYLGSNRASGVPDRFSGSGSGTDFKLQISRVEAEDVGIYYCMQGRQFPYSFGQGTKVEIK

SEQ ID NO: 1007 - protein, 491 aa, synthetic construct
  REGION 1..491: note = Description of Artificial Sequence: Synthetic polypeptide
MALPVTALLLPLALLLHAARPQVQLVQSGAEVKKPGASVKVSCKASGYTFSNYGITWVRQAPGQGLEWMGWISAYNGNTNYAQKFQGRVTMTRNTSISTAYMELSSLRSEDTAVYYCARGPYYYYMDVWGKGTMVTVSSASGGGGSGGRASGGGGSEIVMTQSPLSLPVTPGEPASISCRSSQSLLYSNGYNYVDWYLQKPGQSPQLLIYLGSNRASGVPDRFSGSGSGTDFKLQISRVEAEDVGIYYCMQGRQFPYSFGQGTKVEIKTTTPAPRPPTPAPTIASQPLSLRPEACRPAAGGAVHTRGLDFACDIYIWAPLAGTCGVLLLSLVITLYCKRGRKKLLYIFKQPFMRPVQTTQEEDGCSCRFPEEEEGGCELRVKFSRSADAPAYKQGQNQLYNELNLGRREEYDVLDKRRGRDPEMGGKPRRKNPQEGLYNELQKDKMAEAYSEIGMKGERRRGKGHDGLYQGLSTATKDTYDALHMQALPPR

SEQ ID NO: 1008 - DNA, 1473 bp, synthetic construct
  misc_feature 1..1473: note = Description of Artificial Sequence: Synthetic polynucleotide
  source 1..1473: mol_type = other DNA
atggccctccctgtcaccgccctgctgcttccgctggctcttctgctccacgccgctcggccccaagtccaactggtccagagcggtgcagaagtgaagaagcccggagcgagcgtgaaagtgtcctgcaaggcttccgggtacaccttctccaactacggcatcacttgggtgcgccaggccccgggacagggcctggaatggatggggtggatttccgcgtacaacggcaatacgaactacgctcagaagttccagggtagagtgaccatgactaggaacacctccatttccaccgcctacatggaactgtcctccctgcggagcgaggacaccgccgtgtactattgcgcccggggaccatactactactacatggatgtctgggggaaggggactatggtcaccgtgtcatccgcctcgggaggcggcggatcaggaggacgcgcctctggtggtggaggatcggagatcgtgatgacccagagccctctctccttgcccgtgactcctggggagcccgcatccatttcatgccggagctcccagtcacttctctactccaacggctataactacgtggattggtacctccaaaagccgggccagagcccgcagctgctgatctacctgggctcgaacagggccagcggagtgcctgaccggttctccgggtcgggaagcgggaccgacttcaagctgcaaatctcgagagtggaggccgaggacgtgggaatctactactgtatgcagggccgccagtttccgtactcgttcggacagggcaccaaagtggaaatcaagaccactaccccagcaccgaggccacccaccccggctcctaccatcgcctcccagcctctgtccctgcgtccggaggcatgtagacccgcagctggtggggccgtgcatacccggggtcttgacttcgcctgcgatatctacatttgggcccctctggctggtacttgcggggtcctgctgctttcactcgtgatcactctttactgtaagcgcggtcggaagaagctgctgtacatctttaagcaacccttcatgaggcctgtgcagactactcaagaggaggacggctgttcatgccggttcccagaggaggaggaaggcggctgcgaactgcgcgtgaaattcagccgcagcgcagatgctccagcctacaagcaggggcagaaccagctctacaacgaactcaatcttggtcggagagaggagtacgacgtgctggacaagcggagaggacgggacccagaaatgggcgggaagccgcgcagaaagaatccccaagagggcctgtacaacgagctccaaaaggataagatggcagaagcctatagcgagattggtatgaaaggggaacgcagaagaggcaaaggccacgacggactgtaccagggactcagcaccgccaccaaggacacctatgacgctcttcacatgcaggccctgccgcctcgg

SEQ ID NO: 1009 - protein, 238 aa, synthetic construct
  REGION 1..238: note = Description of Artificial Sequence: Synthetic polypeptide
EVQLLETGGGLVQPGGSLRLSCAVSGFALSNHGMSWVRRAPGKGLEWVSGIVYSGSTYYAASVKGRFTISRDNSRNTLYLQMNSLRPEDTAIYYCSAHGGESDVWGQGTTVTVSSASGGGGSGGRASGGGGSEIVLTQSPATLSVSPGESATLSCRASQSVSSNLAWYQQKPGQAPRLLIYGASTRASGIPDRFSGSGSGTDFTLTISSLQAEDVAVYYCQQYGSSLTFGGGTKVEIK

SEQ ID NO: 1010 - DNA, 714 bp, synthetic construct
  misc_feature 1..714: note = Description of Artificial Sequence: Synthetic polynucleotide
  source 1..714: mol_type = other DNA
gaagtgcaattgctcgaaactggaggaggtctggtgcaacctggaggatcacttcgcctgtcctgcgccgtgtcgggctttgccctgtccaaccatggaatgagctgggtccgccgcgcgccggggaagggcctcgaatgggtgtccggcatcgtctactccggctccacctactacgccgcgtccgtgaagggccggttcacgatttcacgggacaactcgcggaacaccctgtacctccaaatgaattcccttcggccggaggatactgccatctactactgctccgcccacggtggcgaatccgacgtctggggccagggaaccaccgtgaccgtgtccagcgcgtccgggggaggaggaagcgggggtagagcatcgggtggaggcggatcagagatcgtgctgacccagtcccccgccaccttgagcgtgtcaccaggagagtccgccaccctgtcatgccgcgccagccagtccgtgtcctccaacctggcttggtaccagcagaagccggggcaggcccctagactcctgatctatggggcgtcgacccgggcatctggaattcccgataggttcagcggatcgggctcgggcactgacttcactctgaccatctcctcgctgcaagccgaggacgtggctgtgtactactgtcagcagtacggaagctccctgactttcggtggcgggaccaaagtcgagattaag

SEQ ID NO: 1011 - protein, 115 aa, synthetic construct
  REGION 1..115: note = Description of Artificial Sequence: Synthetic polypeptide
EVQLLETGGGLVQPGGSLRLSCAVSGFALSNHGMSWVRRAPGKGLEWVSGIVYSGSTYYAASVKGRFTISRDNSRNTLYLQMNSLRPEDTAIYYCSAHGGESDVWGQGTTVTVSS

SEQ ID NO: 1012 - protein, 106 aa, synthetic construct
  REGION 1..106: note = Description of Artificial Sequence: Synthetic polypeptide
EIVLTQSPATLSVSPGESATLSCRASQSVSSNLAWYQQKPGQAPRLLIYGASTRASGIPDRFSGSGSGTDFTLTISSLQAEDVAVYYCQQYGSSLTFGGGTKVEIK

SEQ ID NO: 1013 - protein, 482 aa, synthetic construct
  REGION 1..482: note = Description of Artificial Sequence: Synthetic polypeptide
MALPVTALLLPLALLLHAARPEVQLLETGGGLVQPGGSLRLSCAVSGFALSNHGMSWVRRAPGKGLEWVSGIVYSGSTYYAASVKGRFTISRDNSRNTLYLQMNSLRPEDTAIYYCSAHGGESDVWGQGTTVTVSSASGGGGSGGRASGGGGSEIVLTQSPATLSVSPGESATLSCRASQSVSSNLAWYQQKPGQAPRLLIYGASTRASGIPDRFSGSGSGTDFTLTISSLQAEDVAVYYCQQYGSSLTFGGGTKVEIKTTTPAPRPPTPAPTIASQPLSLRPEACRPAAGGAVHTRGLDFACDIYIWAPLAGTCGVLLLSLVITLYCKRGRKKLLYIFKQPFMRPVQTTQEEDGCSCRFPEEEEGGCELRVKFSRSADAPAYKQGQNQLYNELNLGRREEYDVLDKRRGRDPEMGGKPRRKNPQEGLYNELQKDKMAEAYSEIGMKGERRRGKGHDGLYQGLSTATKDTYDALHMQALPPR

SEQ ID NO: 1014 - DNA, 1446 bp, synthetic construct
  misc_feature 1..1446: note = Description of Artificial Sequence: Synthetic polynucleotide
  source 1..1446: mol_type = other DNA
atggccctccctgtcaccgccctgctgcttccgctggctcttctgctccacgccgctcggcccgaagtgcaattgctcgaaactggaggaggtctggtgcaacctggaggatcacttcgcctgtcctgcgccgtgtcgggctttgccctgtccaaccatggaatgagctgggtccgccgcgcgccggggaagggcctcgaatgggtgtccggcatcgtctactccggctccacctactacgccgcgtccgtgaagggccggttcacgatttcacgggacaactcgcggaacaccctgtacctccaaatgaattcccttcggccggaggatactgccatctactactgctccgcccacggtggcgaatccgacgtctggggccagggaaccaccgtgaccgtgtccagcgcgtccgggggaggaggaagcgggggtagagcatcgggtggaggcggatcagagatcgtgctgacccagtcccccgccaccttgagcgtgtcaccaggagagtccgccaccctgtcatgccgcgccagccagtccgtgtcctccaacctggcttggtaccagcagaagccggggcaggcccctagactcctgatctatggggcgtcgacccgggcatctggaattcccgataggttcagcggatcgggctcgggcactgacttcactctgaccatctcctcgctgcaagccgaggacgtggctgtgtactactgtcagcagtacggaagctccctgactttcggtggcgggaccaaagtcgagattaagaccactaccccagcaccgaggccacccaccccggctcctaccatcgcctcccagcctctgtccctgcgtccggaggcatgtagacccgcagctggtggggccgtgcatacccggggtcttgacttcgcctgcgatatctacatttgggcccctctggctggtacttgcggggtcctgctgctttcactcgtgatcactctttactgtaagcgcggtcggaagaagctgctgtacatctttaagcaacccttcatgaggcctgtgcagactactcaagaggaggacggctgttcatgccggttcccagaggaggaggaaggcggctgcgaactgcgcgtgaaattcagccgcagcgcagatgctccagcctacaagcaggggcagaaccagctctacaacgaactcaatcttggtcggagagaggagtacgacgtgctggacaagcggagaggacgggacccagaaatgggcgggaagccgcgcagaaagaatccccaagagggcctgtacaacgagctccaaaaggataagatggcagaagcctatagcgagattggtatgaaaggggaacgcagaagaggcaaaggccacgacggactgtaccagggactcagcaccgccaccaaggacacctatgacgctcttcacatgcaggccctgccgcctcgg

SEQ ID NO: 1015 - protein, 239 aa, synthetic construct
  REGION 1..239: note = Description of Artificial Sequence: Synthetic polypeptide
EVQLVETGGGLVQPGGSLRLSCAVSGFALSNHGMSWVRRAPGKGLEWVSGIVYSGSTYYAASVKGRFTISRDNSRNTLYLQMNSLRPEDTAIYYCSAHGGESDVWGQGTTVTVSSASGGGGSGGRASGGGGSEIVMTQSPATLSVSPGERATLSCRASQSVSSKLAWYQQKPGQAPRLLMYGASIRATGIPDRFSGSGSGTEFTLTISSLEPEDFAVYYCQQYGSSSWTFGQGTKVEIK

SEQ ID NO: 1016 - DNA, 717 bp, synthetic construct
  misc_feature 1..717: note = Description of Artificial Sequence: Synthetic polynucleotide
  source 1..717: mol_type = other DNA
gaagtgcaattggtggaaactggaggaggacttgtgcaacctggaggatcattgagactgagctgcgcagtgtcgggattcgccctgagcaaccatggaatgtcctgggtcagaagggcccctggaaaaggcctcgaatgggtgtcagggatcgtgtactccggttccacttactacgccgcctccgtgaaggggcgcttcactatctcacgggataactcccgcaataccctgtacctccaaatgaacagcctgcggccggaggataccgccatctactactgttccgcccacggtggagagtctgacgtctggggccagggaactaccgtgaccgtgtcctccgcgtccggcggtggagggagcggcggccgcgccagcggcggcggaggctccgagatcgtgatgacccagagccccgctactctgtcggtgtcgcccggagaaagggcgaccctgtcctgccgggcgtcgcagtccgtgagcagcaagctggcttggtaccagcagaagccgggccaggcaccacgcctgcttatgtacggtgcctccattcgggccaccggaatcccggaccggttctcggggtcggggtccggtaccgagttcacactgaccatttcctcgctcgagcccgaggactttgccgtctattactgccagcagtacggctcctcctcatggacgttcggccaggggaccaaggtcgaaatcaag

SEQ ID NO: 1017 - protein, 115 aa, synthetic construct
  REGION 1..115: note = Description of Artificial Sequence: Synthetic polypeptide
EVQLVETGGGLVQPGGSLRLSCAVSGFALSNHGMSWVRRAPGKGLEWVSGIVYSGSTYYAASVKGRFTISRDNSRNTLYLQMNSLRPEDTAIYYCSAHGGESDVWGQGTTVTVSS

SEQ ID NO: 1018 - protein, 107 aa, synthetic construct
  REGION 1..107: note = Description of Artificial Sequence: Synthetic polypeptide
EIVMTQSPATLSVSPGERATLSCRASQSVSSKLAWYQQKPGQAPRLLMYGASIRATGIPDRFSGSGSGTEFTLTISSLEPEDFAVYYCQQYGSSSWTFGQGTKVEIK

SEQ ID NO: 1019 - protein, 483 aa, synthetic construct
  REGION 1..483: note = Description of Artificial Sequence: Synthetic polypeptide
MALPVTALLLPLALLLHAARPEVQLVETGGGLVQPGGSLRLSCAVSGFALSNHGMSWVRRAPGKGLEWVSGIVYSGSTYYAASVKGRFTISRDNSRNTLYLQMNSLRPEDTAIYYCSAHGGESDVWGQGTTVTVSSASGGGGSGGRASGGGGSEIVMTQSPATLSVSPGERATLSCRASQSVSSKLAWYQQKPGQAPRLLMYGASIRATGIPDRFSGSGSGTEFTLTISSLEPEDFAVYYCQQYGSSSWTFGQGTKVEIKTTTPAPRPPTPAPTIASQPLSLRPEACRPAAGGAVHTRGLDFACDIYIWAPLAGTCGVLLLSLVITLYCKRGRKKLLYIFKQPFMRPVQTTQEEDGCSCRFPEEEEGGCELRVKFSRSADAPAYKQGQNQLYNELNLGRREEYDVLDKRRGRDPEMGGKPRRKNPQEGLYNELQKDKMAEAYSEIGMKGERRRGKGHDGLYQGLSTATKDTYDALHMQALPPR

SEQ ID NO: 1020 - DNA, 1449 bp, synthetic construct
  misc_feature 1..1449: note = Description of Artificial Sequence: Synthetic polynucleotide
  source 1..1449: mol_type = other DNA
atggccctccctgtcaccgccctgctgcttccgctggctcttctgctccacgccgctcggcccgaagtgcaattggtggaaactggaggaggacttgtgcaacctggaggatcattgagactgagctgcgcagtgtcgggattcgccctgagcaaccatggaatgtcctgggtcagaagggcccctggaaaaggcctcgaatgggtgtcagggatcgtgtactccggttccacttactacgccgcctccgtgaaggggcgcttcactatctcacgggataactcccgcaataccctgtacctccaaatgaacagcctgcggccggaggataccgccatctactactgttccgcccacggtggagagtctgacgtctggggccagggaactaccgtgaccgtgtcctccgcgtccggcggtggagggagcggcggccgcgccagcggcggcggaggctccgagatcgtgatgacccagagccccgctactctgtcggtgtcgcccggagaaagggcgaccctgtcctgccgggcgtcgcagtccgtgagcagcaagctggcttggtaccagcagaagccgggccaggcaccacgcctgcttatgtacggtgcctccattcgggccaccggaatcccggaccggttctcggggtcggggtccggtaccgagttcacactgaccatttcctcgctcgagcccgaggactttgccgtctattactgccagcagtacggctcctcctcatggacgttcggccaggggaccaaggtcgaaatcaagaccactaccccagcaccgaggccacccaccccggctcctaccatcgcctcccagcctctgtccctgcgtccggaggcatgtagacccgcagctggtggggccgtgcatacccggggtcttgacttcgcctgcgatatctacatttgggcccctctggctggtacttgcggggtcctgctgctttcactcgtgatcactctttactgtaagcgcggtcggaagaagctgctgtacatctttaagcaacccttcatgaggcctgtgcagactactcaagaggaggacggctgttcatgccggttcccagaggaggaggaaggcggctgcgaactgcgcgtgaaattcagccgcagcgcagatgctccagcctacaagcaggggcagaaccagctctacaacgaactcaatcttggtcggagagaggagtacgacgtgctggacaagcggagaggacgggacccagaaatgggcgggaagccgcgcagaaagaatccccaagagggcctgtacaacgagctccaaaaggataagatggcagaagcctatagcgagattggtatgaaaggggaacgcagaagaggcaaaggccacgacggactgtaccagggactcagcaccgccaccaaggacacctatgacgctcttcacatgcaggccctgccgcctcgg

SEQ ID NO: 1021 - protein, 241 aa, synthetic construct
  REGION 1..241: note = Description of Artificial Sequence: Synthetic polypeptide
EVQLVETGGGVVQPGGSLRLSCAVSGFALSNHGMSWVRRAPGKGLEWVSGIVYSGSTYYAASVKGRFTISRDNSRNTLYLQMNSLRPEDTAIYYCSAHGGESDVWGQGTTVTVSSASGGGGSGGRASGGGGSEIVLTQSPGTLSLSPGERATLSCRASQSVGSTNLAWYQQKPGQAPRLLIYDASNRATGIPDRFSGGGSGTDFTLTISRLEPEDFAVYYCQQYGSSPPWTFGQGTKVEIK

SEQ ID NO: 1022 - DNA, 723 bp, synthetic construct
  misc_feature 1..723: note = Description of Artificial Sequence: Synthetic polynucleotide
  source 1..723: mol_type = other DNA
gaagtgcaattggtggagactggaggaggagtggtgcaacctggaggaagcctgagactgtcatgcgcggtgtcgggcttcgccctctccaaccacggaatgtcctgggtccgccgggcccctgggaaaggacttgaatgggtgtccggcatcgtgtactcgggttccacctactacgcggcctcagtgaagggccggtttactattagccgcgacaactccagaaacacactgtacctccaaatgaactcgctgcggccggaagataccgctatctactactgctccgcccatgggggagagtcggacgtctggggacagggcaccactgtcactgtgtccagcgcttccggcggtggtggaagcgggggacgggcctcaggaggcggtggcagcgagattgtgctgacccagtcccccgggaccctgagcctgtccccgggagaaagggccaccctctcctgtcgggcatcccagtccgtggggtctactaaccttgcatggtaccagcagaagcccggccaggcccctcgcctgctgatctacgacgcgtccaatagagccaccggcatcccggatcgcttcagcggaggcggatcgggcaccgacttcaccctcaccatttcaaggctggaaccggaggacttcgccgtgtactactgccagcagtatggttcgtccccaccctggacgttcggccaggggactaaggtcgagatcaag

SEQ ID NO: 1023 - protein, 115 aa, synthetic construct
  REGION 1..115: note = Description of Artificial Sequence: Synthetic polypeptide
EVQLVETGGGVVQPGGSLRLSCAVSGFALSNHGMSWVRRAPGKGLEWVSGIVYSGSTYYAASVKGRFTISRDNSRNTLYLQMNSLRPEDTAIYYCSAHGGESDVWGQGTTVTVSS

SEQ ID NO: 1024 - protein, 109 aa, synthetic construct
  REGION 1..109: note = Description of Artificial Sequence: Synthetic polypeptide
EIVLTQSPGTLSLSPGERATLSCRASQSVGSTNLAWYQQKPGQAPRLLIYDASNRATGIPDRFSGGGSGTDFTLTISRLEPEDFAVYYCQQYGSSPPWTFGQGTKVEIK

SEQ ID NO: 1025 - protein, 485 aa, synthetic construct
  REGION 1..485: note = Description of Artificial Sequence: Synthetic polypeptide
MALPVTALLLPLALLLHAARPEVQLVETGGGVVQPGGSLRLSCAVSGFALSNHGMSWVRRAPGKGLEWVSGIVYSGSTYYAASVKGRFTISRDNSRNTLYLQMNSLRPEDTAIYYCSAHGGESDVWGQGTTVTVSSASGGGGSGGRASGGGGSEIVLTQSPGTLSLSPGERATLSCRASQSVGSTNLAWYQQKPGQAPRLLIYDASNRATGIPDRFSGGGSGTDFTLTISRLEPEDFAVYYCQQYGSSPPWTFGQGTKVEIKTTTPAPRPPTPAPTIASQPLSLRPEACRPAAGGAVHTRGLDFACDIYIWAPLAGTCGVLLLSLVITLYCKRGRKKLLYIFKQPFMRPVQTTQEEDGCSCRFPEEEEGGCELRVKFSRSADAPAYKQGQNQLYNELNLGRREEYDVLDKRRGRDPEMGGKPRRKNPQEGLYNELQKDKMAEAYSEIGMKGERRRGKGHDGLYQGLSTATKDTYDALHMQALPPR

SEQ ID NO: 1026 - DNA, 1455 bp, synthetic construct
  misc_feature 1..1455: note = Description of Artificial Sequence: Synthetic polynucleotide
  source 1..1455: mol_type = other DNA
atggccctccctgtcaccgccctgctgcttccgctggctcttctgctccacgccgctcggcccgaagtgcaattggtggagactggaggaggagtggtgcaacctggaggaagcctgagactgtcatgcgcggtgtcgggcttcgccctctccaaccacggaatgtcctgggtccgccgggcccctgggaaaggacttgaatgggtgtccggcatcgtgtactcgggttccacctactacgcggcctcagtgaagggccggtttactattagccgcgacaactccagaaacacactgtacctccaaatgaactcgctgcggccggaagataccgctatctactactgctccgcccatgggggagagtcggacgtctggggacagggcaccactgtcactgtgtccagcgcttccggcggtggtggaagcgggggacgggcctcaggaggcggtggcagcgagattgtgctgacccagtcccccgggaccctgagcctgtccccgggagaaagggccaccctctcctgtcgggcatcccagtccgtggggtctactaaccttgcatggtaccagcagaagcccggccaggcccctcgcctgctgatctacgacgcgtccaatagagccaccggcatcccggatcgcttcagcggaggcggatcgggcaccgacttcaccctcaccatttcaaggctggaaccggaggacttcgccgtgtactactgccagcagtatggttcgtccccaccctggacgttcggccaggggactaaggtcgagatcaagaccactaccccagcaccgaggccacccaccccggctcctaccatcgcctcccagcctctgtccctgcgtccggaggcatgtagacccgcagctggtggggccgtgcatacccggggtcttgacttcgcctgcgatatctacatttgggcccctctggctggtacttgcggggtcctgctgctttcactcgtgatcactctttactgtaagcgcggtcggaagaagctgctgtacatctttaagcaacccttcatgaggcctgtgcagactactcaagaggaggacggctgttcatgccggttcccagaggaggaggaaggcggctgcgaactgcgcgtgaaattcagccgcagcgcagatgctccagcctacaagcaggggcagaaccagctctacaacgaactcaatcttggtcggagagaggagtacgacgtgctggacaagcggagaggacgggacccagaaatgggcgggaagccgcgcagaaagaatccccaagagggcctgtacaacgagctccaaaaggataagatggcagaagcctatagcgagattggtatgaaaggggaacgcagaagaggcaaaggccacgacggactgtaccagggactcagcaccgccaccaaggacacctatgacgctcttcacatgcaggccctgccgcctcgg

SEQ ID NO: 1027 - protein, 239 aa, synthetic construct
  REGION 1..239: note = Description of Artificial Sequence: Synthetic polypeptide
QVQLVESGGGLVKPGGSLRLSCAASGFTFSDYYMSWIRQAPGKGLEWVSYISSSGSTIYYADSVKGRFTISRDNAKNSLYLQMNSLRAEDTAVYYCARESGDGMDVWGQGTTVTVSSASGGGGSGGRASGGGGSDIQMTQSPSSLSASVGDRVTITCRASQSISSYLNWYQQKPGKAPKLLIYAASSLQSGVPSRFSGSGSGTDFTLTISSLQPEDFATYYCQQSYTLAFGQGTKVDIK

SEQ ID NO: 1028 - DNA, 717 bp, synthetic construct
  misc_feature 1..717: note = Description of Artificial Sequence: Synthetic polynucleotide
  source 1..717: mol_type = other DNA
caagtgcaactcgtggaatctggtggaggactcgtgaaacctggaggatcattgagactgtcatgcgcggcctcgggattcacgttctccgattactacatgagctggattcgccaggctccggggaagggactggaatgggtgtcctacatttcctcatccggctccaccatctactacgcggactccgtgaaggggagattcaccattagccgcgataacgccaagaacagcctgtaccttcagatgaactccctgcgggctgaagatactgccgtctactactgcgcaagggagagcggagatgggatggacgtctggggacagggtaccactgtgaccgtgtcgtcggcctccggcggagggggttcgggtggaagggccagcggcggcggaggcagcgacatccagatgacccagtccccctcatcgctgtccgcctccgtgggcgaccgcgtcaccatcacatgccgggcctcacagtcgatctcctcctacctcaattggtatcagcagaagcccggaaaggcccctaagcttctgatctacgcagcgtcctccctgcaatccggggtcccatctcggttctccggctcgggcagcggtaccgacttcactctgaccatctcgagcctgcagccggaggacttcgccacttactactgtcagcaaagctacaccctcgcgtttggccagggcaccaaagtggacatcaag

SEQ ID NO: 1029 - protein, 117 aa, synthetic construct
  REGION 1..117: note = Description of Artificial Sequence: Synthetic polypeptide
QVQLVESGGGLVKPGGSLRLSCAASGFTFSDYYMSWIRQAPGKGLEWVSYISSSGSTIYYADSVKGRFTISRDNAKNSLYLQMNSLRAEDTAVYYCARESGDGMDVWGQGTTVTVSS

SEQ ID NO: 1030 - protein, 105 aa, synthetic construct
  REGION 1..105: note = Description of Artificial Sequence: Synthetic polypeptide
DIQMTQSPSSLSASVGDRVTITCRASQSISSYLNWYQQKPGKAPKLLIYAASSLQSGVPSRFSGSGSGTDFTLTISSLQPEDFATYYCQQSYTLAFGQGTKVDIK

SEQ ID NO: 1031 - protein, 483 aa, synthetic construct
  REGION 1..483: note = Description of Artificial Sequence: Synthetic polypeptide
MALPVTALLLPLALLLHAARPQVQLVESGGGLVKPGGSLRLSCAASGFTFSDYYMSWIRQAPGKGLEWVSYISSSGSTIYYADSVKGRFTISRDNAKNSLYLQMNSLRAEDTAVYYCARESGDGMDVWGQGTTVTVSSASGGGGSGGRASGGGGSDIQMTQSPSSLSASVGDRVTITCRASQSISSYLNWYQQKPGKAPKLLIYAASSLQSGVPSRFSGSGSGTDFTLTISSLQPEDFATYYCQQSYTLAFGQGTKVDIKTTTPAPRPPTPAPTIASQPLSLRPEACRPAAGGAVHTRGLDFACDIYIWAPLAGTCGVLLLSLVITLYCKRGRKKLLYIFKQPFMRPVQTTQEEDGCSCRFPEEEEGGCELRVKFSRSADAPAYKQGQNQLYNELNLGRREEYDVLDKRRGRDPEMGGKPRRKNPQEGLYNELQKDKMAEAYSEIGMKGERRRGKGHDGLYQGLSTATKDTYDALHMQALPPR

SEQ ID NO: 1032 - DNA, 1449 bp, synthetic construct
  misc_feature 1..1449: note = Description of Artificial Sequence: Synthetic polynucleotide
  source 1..1449: mol_type = other DNA
atggccctccctgtcaccgccctgctgcttccgctggctcttctgctccacgccgctcggccccaagtgcaactcgtggaatctggtggaggactcgtgaaacctggaggatcattgagactgtcatgcgcggcctcgggattcacgttctccgattactacatgagctggattcgccaggctccggggaagggactggaatgggtgtcctacatttcctcatccggctccaccatctactacgcggactccgtgaaggggagattcaccattagccgcgataacgccaagaacagcctgtaccttcagatgaactccctgcgggctgaagatactgccgtctactactgcgcaagggagagcggagatgggatggacgtctggggacagggtaccactgtgaccgtgtcgtcggcctccggcggagggggttcgggtggaagggccagcggcggcggaggcagcgacatccagatgacccagtccccctcatcgctgtccgcctccgtgggcgaccgcgtcaccatcacatgccgggcctcacagtcgatctcctcctacctcaattggtatcagcagaagcccggaaaggcccctaagcttctgatctacgcagcgtcctccctgcaatccggggtcccatctcggttctccggctcgggcagcggtaccgacttcactctgaccatctcgagcctgcagccggaggacttcgccacttactactgtcagcaaagctacaccctcgcgtttggccagggcaccaaagtggacatcaagaccactaccccagcaccgaggccacccaccccggctcctaccatcgcctcccagcctctgtccctgcgtccggaggcatgtagacccgcagctggtggggccgtgcatacccggggtcttgacttcgcctgcgatatctacatttgggcccctctggctggtacttgcggggtcctgctgctttcactcgtgatcactctttactgtaagcgcggtcggaagaagctgctgtacatctttaagcaacccttcatgaggcctgtgcagactactcaagaggaggacggctgttcatgccggttcccagaggaggaggaaggcggctgcgaactgcgcgtgaaattcagccgcagcgcagatgctccagcctacaagcaggggcagaaccagctctacaacgaactcaatcttggtcggagagaggagtacgacgtgctggacaagcggagaggacgggacccagaaatgggcgggaagccgcgcagaaagaatccccaagagggcctgtacaacgagctccaaaaggataagatggcagaagcctatagcgagattggtatgaaaggggaacgcagaagaggcaaaggccacgacggactgtaccagggactcagcaccgccaccaaggacacctatgacgctcttcacatgcaggccctgccgcctcgg

SEQ ID NO: 1033 - protein, 246 aa, synthetic construct
  REGION 1..246: note = Description of Artificial Sequence: Synthetic polypeptide
QVQLVQSGGGLVKPGGSLRLSCAASGFTFSDYYMSWIRQAPGKGLEWVSYISSSGNTIYYADSVKGRFTISRDNAKNSLYLQMNSLRAEDTAVYYCARSTMVREDYWGQGTLVTVSSASGGGGSGGRASGGGGSDIVLTQSPLSLPVTLGQPASISCKSSESLVHNSGKTYLNWFHQRPGQSPRRLIYEVSNRDSGVPDRFTGSGSGTDFTLKISRVEAEDVGVYYCMQGTHWPGTFGQGTKLEIK

SEQ ID NO: 1034 - DNA, 738 bp, synthetic construct
  misc_feature 1..738: note = Description of Artificial Sequence: Synthetic polynucleotide
  source 1..738: mol_type = other DNA
caagtgcaactggtgcaaagcggaggaggattggtcaaacccggaggaagcctgagactgtcatgcgcggcctctggattcaccttctccgattactacatgtcatggatcagacaggccccggggaagggcctcgaatgggtgtcctacatctcgtcctccgggaacaccatctactacgccgacagcgtgaagggccgctttaccatttcccgcgacaacgcaaagaactcgctgtaccttcagatgaattccctgcgggctgaagataccgcggtgtactattgcgcccggtccactatggtccgggaggactactggggacagggcacactcgtgaccgtgtccagcgcgagcgggggtggaggcagcggtggacgcgcctccggcggcggcggttcagacatcgtgctgactcagtcgcccctgtcgctgccggtcaccctgggccaaccggcctcaattagctgcaagtcctcggagagcctggtgcacaactcaggaaagacttacctgaactggttccatcagcggcctggacagtccccacggaggctcatctatgaagtgtccaacagggattcgggggtgcccgaccgcttcactggctccgggtccggcaccgacttcaccttgaaaatctccagagtggaagccgaggacgtgggcgtgtactactgtatgcagggtacccactggcctggaacctttggacaaggaactaagctcgagattaag

SEQ ID NO: 1035 - protein, 117 aa, synthetic construct
  REGION 1..117: note = Description of Artificial Sequence: Synthetic polypeptide
QVQLVQSGGGLVKPGGSLRLSCAASGFTFSDYYMSWIRQAPGKGLEWVSYISSSGNTIYYADSVKGRFTISRDNAKNSLYLQMNSLRAEDTAVYYCARSTMVREDYWGQGTLVTVSS

SEQ ID NO: 1036 - protein, 112 aa, synthetic construct
  REGION 1..112: note = Description of Artificial Sequence: Synthetic polypeptide
DIVLTQSPLSLPVTLGQPASISCKSSESLVHNSGKTYLNWFHQRPGQSPRRLIYEVSNRDSGVPDRFTGSGSGTDFTLKISRVEAEDVGVYYCMQGTHWPGTFGQGTKLEIK

SEQ ID NO: 1037 - protein, 490 aa, synthetic construct
  REGION 1..490: note = Description of Artificial Sequence: Synthetic polypeptide
MALPVTALLLPLALLLHAARPQVQLVQSGGGLVKPGGSLRLSCAASGFTFSDYYMSWIRQAPGKGLEWVSYISSSGNTIYYADSVKGRFTISRDNAKNSLYLQMNSLRAEDTAVYYCARSTMVREDYWGQGTLVTVSSASGGGGSGGRASGGGGSDIVLTQSPLSLPVTLGQPASISCKSSESLVHNSGKTYLNWFHQRPGQSPRRLIYEVSNRDSGVPDRFTGSGSGTDFTLKISRVEAEDVGVYYCMQGTHWPGTFGQGTKLEIKTTTPAPRPPTPAPTIASQPLSLRPEACRPAAGGAVHTRGLDFACDIYIWAPLAGTCGVLLLSLVITLYCKRGRKKLLYIFKQPFMRPVQTTQEEDGCSCRFPEEEEGGCELRVKFSRSADAPAYKQGQNQLYNELNLGRREEYDVLDKRRGRDPEMGGKPRRKNPQEGLYNELQKDKMAEAYSEIGMKGERRRGKGHDGLYQGLSTATKDTYDALHMQALPPR

SEQ ID NO: 1038 - DNA, 1470 bp, synthetic construct
  misc_feature 1..1470: note = Description of Artificial Sequence: Synthetic polynucleotide
  source 1..1470: mol_type = other DNA
atggccctccctgtcaccgccctgctgcttccgctggctcttctgctccacgccgctcggccccaagtgcaactggtgcaaagcggaggaggattggtcaaacccggaggaagcctgagactgtcatgcgcggcctctggattcaccttctccgattactacatgtcatggatcagacaggccccggggaagggcctcgaatgggtgtcctacatctcgtcctccgggaacaccatctactacgccgacagcgtgaagggccgctttaccatttcccgcgacaacgcaaagaactcgctgtaccttcagatgaattccctgcgggctgaagataccgcggtgtactattgcgcccggtccactatggtccgggaggactactggggacagggcacactcgtgaccgtgtccagcgcgagcgggggtggaggcagcggtggacgcgcctccggcggcggcggttcagacatcgtgctgactcagtcgcccctgtcgctgccggtcaccctgggccaaccggcctcaattagctgcaagtcctcggagagcctggtgcacaactcaggaaagacttacctgaactggttccatcagcggcctggacagtccccacggaggctcatctatgaagtgtccaacagggattcgggggtgcccgaccgcttcactggctccgggtccggcaccgacttcaccttgaaaatctccagagtggaagccgaggacgtgggcgtgtactactgtatgcagggtacccactggcctggaacctttggacaaggaactaagctcgagattaagaccactaccccagcaccgaggccacccaccccggctcctaccatcgcctcccagcctctgtccctgcgtccggaggcatgtagacccgcagctggtggggccgtgcatacccggggtcttgacttcgcctgcgatatctacatttgggcccctctggctggtacttgcggggtcctgctgctttcactcgtgatcactctttactgtaagcgcggtcggaagaagctgctgtacatctttaagcaacccttcatgaggcctgtgcagactactcaagaggaggacggctgttcatgccggttcccagaggaggaggaaggcggctgcgaactgcgcgtgaaattcagccgcagcgcagatgctccagcctacaagcaggggcagaaccagctctacaacgaactcaatcttggtcggagagaggagtacgacgtgctggacaagcggagaggacgggacccagaaatgggcgggaagccgcgcagaaagaatccccaagagggcctgtacaacgagctccaaaaggataagatggcagaagcctatagcgagattggtatgaaaggggaacgcagaagaggcaaaggccacgacggactgtaccagggactcagcaccgccaccaaggacacctatgacgctcttcacatgcaggccctgccgcctcgg

SEQ ID NO: 1039 - protein, 239 aa, synthetic construct
  REGION 1..239: note = Description of Artificial Sequence: Synthetic polypeptide
QVQLVESGGGLVQPGGSLRLSCAVSGFALSNHGMSWVRRAPGKGLEWVSGIVYSGSTYYAASVKGRFTISRDNSRNTLYLQMNSLRPEDTAIYYCSAHGGESDVWGQGTTVTVSSASGGGGSGGRASGGGGSDIRLTQSPSPLSASVGDRVTITCQASEDINKFLNWYHQTPGKAPKLLIYDASTLQTGVPSRFSGSGSGTDFTLTINSLQPEDIGTYYCQQYESLPLTFGGGTKVEIK

SEQ ID NO: 1040 - DNA, 717 bp, synthetic construct
  misc_feature 1..717: note = Description of Artificial Sequence: Synthetic polynucleotide
  source 1..717: mol_type = other DNA
caagtgcaactcgtggaatctggtggaggactcgtgcaacccggtggaagccttaggctgtcgtgcgccgtcagcgggtttgctctgagcaaccatggaatgtcctgggtccgccgggcaccgggaaaagggctggaatgggtgtccggcatcgtgtacagcgggtcaacctattacgccgcgtccgtgaagggcagattcactatctcaagagacaacagccggaacaccctgtacttgcaaatgaattccctgcgccccgaggacaccgccatctactactgctccgcccacggaggagagtcggacgtgtggggccagggaacgactgtgactgtgtccagcgcatcaggagggggtggttcgggcggccgggcctcggggggaggaggttccgacattcggctgacccagtccccgtccccactgtcggcctccgtcggcgaccgcgtgaccatcacttgtcaggcgtccgaggacattaacaagttcctgaactggtaccaccagacccctggaaaggcccccaagctgctgatctacgatgcctcgacccttcaaactggagtgcctagccggttctccgggtccggctccggcactgatttcactctgaccatcaactcattgcagccggaagatatcgggacctactattgccagcagtacgaatccctcccgctcacattcggcgggggaaccaaggtcgagattaag

SEQ ID NO: 1041 - protein, 115 aa, synthetic construct
  REGION 1..115: note = Description of Artificial Sequence: Synthetic polypeptide
QVQLVESGGGLVQPGGSLRLSCAVSGFALSNHGMSWVRRAPGKGLEWVSGIVYSGSTYYAASVKGRFTISRDNSRNTLYLQMNSLRPEDTAIYYCSAHGGESDVWGQGTTVTVSS

SEQ ID NO: 1042 - protein, 107 aa, synthetic construct
  REGION 1..107: note = Description of Artificial Sequence: Synthetic polypeptide
DIRLTQSPSPLSASVGDRVTITCQASEDINKFLNWYHQTPGKAPKLLIYDASTLQTGVPSRFSGSGSGTDFTLTINSLQPEDIGTYYCQQYESLPLTFGGGTKVEIK

SEQ ID NO: 1043 - protein, 483 aa, synthetic construct
  REGION 1..483: note = Description of Artificial Sequence: Synthetic polypeptide
MALPVTALLLPLALLLHAARPQVQLVESGGGLVQPGGSLRLSCAVSGFALSNHGMSWVRRAPGKGLEWVSGIVYSGSTYYAASVKGRFTISRDNSRNTLYLQMNSLRPEDTAIYYCSAHGGESDVWGQGTTVTVSSASGGGGSGGRASGGGGSDIRLTQSPSPLSASVGDRVTITCQASEDINKFLNWYHQTPGKAPKLLIYDASTLQTGVPSRFSGSGSGTDFTLTINSLQPEDIGTYYCQQYESLPLTFGGGTKVEIKTTTPAPRPPTPAPTIASQPLSLRPEACRPAAGGAVHTRGLDFACDIYIWAPLAGTCGVLLLSLVITLYCKRGRKKLLYIFKQPFMRPVQTTQEEDGCSCRFPEEEEGGCELRVKFSRSADAPAYKQGQNQLYNELNLGRREEYDVLDKRRGRDPEMGGKPRRKNPQEGLYNELQKDKMAEAYSEIGMKGERRRGKGHDGLYQGLSTATKDTYDALHMQALPPR

SEQ ID NO: 1044 - DNA, 1449 bp, synthetic construct
  misc_feature 1..1449: note = Description of Artificial Sequence: Synthetic polynucleotide
  source 1..1449: mol_type = other DNA
atggccctccctgtcaccgccctgctgcttccgctggctcttctgctccacgccgctcggccccaagtgcaactcgtggaatctggtggaggactcgtgcaacccggtggaagccttaggctgtcgtgcgccgtcagcgggtttgctctgagcaaccatggaatgtcctgggtccgccgggcaccgggaaaagggctggaatgggtgtccggcatcgtgtacagcgggtcaacctattacgccgcgtccgtgaagggcagattcactatctcaagagacaacagccggaacaccctgtacttgcaaatgaattccctgcgccccgaggacaccgccatctactactgctccgcccacggaggagagtcggacgtgtggggccagggaacgactgtgactgtgtccagcgcatcaggagggggtggttcgggcggccgggcctcggggggaggaggttccgacattcggctgacccagtccccgtccccactgtcggcctccgtcggcgaccgcgtgaccatcacttgtcaggcgtccgaggacattaacaagttcctgaactggtaccaccagacccctggaaaggcccccaagctgctgatctacgatgcctcgacccttcaaactggagtgcctagccggttctccgggtccggctccggcactgatttcactctgaccatcaactcattgcagccggaagatatcgggacctactattgccagcagtacgaatccctcccgctcacattcggcgggggaaccaaggtcgagattaagaccactaccccagcaccgaggccacccaccccggctcctaccatcgcctcccagcctctgtccctgcgtccggaggcatgtagacccgcagctggtggggccgtgcatacccggggtcttgacttcgcctgcgatatctacatttgggcccctctggctggtacttgcggggtcctgctgctttcactcgtgatcactctttactgtaagcgcggtcggaagaagctgctgtacatctttaagcaacccttcatgaggcctgtgcagactactcaagaggaggacggctgttcatgccggttcccagaggaggaggaaggcggctgcgaactgcgcgtgaaattcagccgcagcgcagatgctccagcctacaagcaggggcagaaccagctctacaacgaactcaatcttggtcggagagaggagtacgacgtgctggacaagcggagaggacgggacccagaaatgggcgggaagccgcgcagaaagaatccccaagagggcctgtacaacgagctccaaaaggataagatggcagaagcctatagcgagattggtatgaaaggggaacgcagaagaggcaaaggccacgacggactgtaccagggactcagcaccgccaccaaggacacctatgacgctcttcacatgcaggccctgccgcctcgg

SEQ ID NO: 1045 - protein, 240 aa, synthetic construct
  REGION 1..240: note = Description of Artificial Sequence: Synthetic polypeptide
EVQLVETGGGLVQPGGSLRLSCAVSGFALSNHGMSWVRRAPGKGLEWVSGIVYSGSTYYAASVKGRFTISRDNSRNTLYLQMNSLRPEDTAIYYCSAHGGESDVWGQGTTVTVSSASGGGGSGGRASGGGGSETTLTQSPATLSVSPGERATLSCRASQSVGSNLAWYQQKPGQGPRLLIYGASTRATGIPARFSGSGSGTEFTLTISSLQPEDFAVYYCQQYNDWLPVTFGQGTKVEIK

SEQ ID NO: 1046 - DNA, 720 bp, synthetic construct
  misc_feature 1..720: note = Description of Artificial Sequence: Synthetic polynucleotide
  source 1..720: mol_type = other DNA
gaagtgcaattggtggaaactggaggaggacttgtgcaacctggaggatcattgcggctctcatgcgctgtctccggcttcgccctgtcaaatcacgggatgtcgtgggtcagacgggccccgggaaagggtctggaatgggtgtcggggattgtgtacagcggctccacctactacgccgcttcggtcaagggccgcttcactatttcacgggacaacagccgcaacaccctctatctgcaaatgaactctctccgcccggaggataccgccatctactactgctccgcacacggcggcgaatccgacgtgtggggacagggaaccactgtcaccgtgtcgtccgcatccggtggcggaggatcgggtggccgggcctccgggggcggcggcagcgagactaccctgacccagtcccctgccactctgtccgtgagcccgggagagagagccacccttagctgccgggccagccagagcgtgggctccaacctggcctggtaccagcagaagccaggacagggtcccaggctgctgatctacggagcctccactcgcgcgaccggcatccccgcgaggttctccgggtcgggttccgggaccgagttcaccctgaccatctcctccctccaaccggaggacttcgcggtgtactactgtcagcagtacaacgattggctgcccgtgacatttggacaggggacgaaggtggaaatcaaa

SEQ ID NO: 1047 - protein, 115 aa, synthetic construct; identical to SEQ ID NO: 1017
  REGION 1..115: note = Description of Artificial Sequence: Synthetic polypeptide

SEQ ID NO: 1048 - protein, 108 aa, synthetic construct
  REGION 1..108: note = Description of Artificial Sequence: Synthetic polypeptide
ETTLTQSPATLSVSPGERATLSCRASQSVGSNLAWYQQKPGQGPRLLIYGASTRATGIPARFSGSGSGTEFTLTISSLQPEDFAVYYCQQYNDWLPVTFGQGTKVEIK

SEQ ID NO: 1049 - protein, 484 aa, synthetic construct
  REGION 1..484: note = Description of Artificial Sequence: Synthetic polypeptide
MALPVTALLLPLALLLHAARPEVQLVETGGGLVQPGGSLRLSCAVSGFALSNHGMSWVRRAPGKGLEWVSGIVYSGSTYYAASVKGRFTISRDNSRNTLYLQMNSLRPEDTAIYYCSAHGGESDVWGQGTTVTVSSASGGGGSGGRASGGGGSETTLTQSPATLSVSPGERATLSCRASQSVGSNLAWYQQKPGQGPRLLIYGASTRATGIPARFSGSGSGTEFTLTISSLQPEDFAVYYCQQYNDWLPVTFGQGTKVEIKTTTPAPRPPTPAPTIASQPLSLRPEACRPAAGGAVHTRGLDFACDIYIWAPLAGTCGVLLLSLVITLYCKRGRKKLLYIFKQPFMRPVQTTQEEDGCSCRFPEEEEGGCELRVKFSRSADAPAYKQGQNQLYNELNLGRREEYDVLDKRRGRDPEMGGKPRRKNPQEGLYNELQKDKMAEAYSEIGMKGERRRGKGHDGLYQGLSTATKDTYDALHMQALPPR

SEQ ID NO: 1050 - DNA, 1452 bp, synthetic construct
  misc_feature 1..1452: note = Description of Artificial Sequence: Synthetic polynucleotide
  source 1..1452: mol_type = other DNA
atggccctccctgtcaccgccctgctgcttccgctggctcttctgctccacgccgctcggcccgaagtgcaattggtggaaactggaggaggacttgtgcaacctggaggatcattgcggctctcatgcgctgtctccggcttcgccctgtcaaatcacgggatgtcgtgggtcagacgggccccgggaaagggtctggaatgggtgtcggggattgtgtacagcggctccacctactacgccgcttcggtcaagggccgcttcactatttcacgggacaacagccgcaacaccctctatctgcaaatgaactctctccgcccggaggataccgccatctactactgctccgcacacggcggcgaatccgacgtgtggggacagggaaccactgtcaccgtgtcgtccgcatccggtggcggaggatcgggtggccgggcctccgggggcggcggcagcgagactaccctgacccagtcccctgccactctgtccgtgagcccgggagagagagccacccttagctgccgggccagccagagcgtgggctccaacctggcctggtaccagcagaagccaggacagggtcccaggctgctgatctacggagcctccactcgcgcgaccggcatccccgcgaggttctccgggtcgggttccgggaccgagttcaccctgaccatctcctccctccaaccggaggacttcgcggtgtactactgtcagcagtacaacgattggctgcccgtgacatttggacaggggacgaaggtggaaatcaaaaccactaccccagcaccgaggccacccaccccggctcctaccatcgcctcccagcctctgtccctgcgtccggaggcatgtagacccgcagctggtggggccgtgcatacccggggtcttgacttcgcctgcgatatctacatttgggcccctctggctggtacttgcggggtcctgctgctttcactcgtgatcactctttactgtaagcgcggtcggaagaagctgctgtacatctttaagcaacccttcatgaggcctgtgcagactactcaagaggaggacggctgttcatgccggttcccagaggaggaggaaggcggctgcgaactgcgcgtgaaattcagccgcagcgcagatgctccagcctacaagcaggggcagaaccagctctacaacgaactcaatcttggtcggagagaggagtacgacgtgctggacaagcggagaggacgggacccagaaatgggcgggaagccgcgcagaaagaatccccaagagggcctgtacaacgagctccaaaaggataagatggcagaagcctatagcgagattggtatgaaaggggaacgcagaagaggcaaaggccacgacggactgtaccagggactcagcaccgccaccaaggacacctatgacgctcttcacatgcaggccctgccgcctcgg

SEQ ID NO: 1051 - protein, 241 aa, synthetic construct
  REGION 1..241: note = Description of Artificial Sequence: Synthetic polypeptide
EVQLVESGGGLVQPGGSLRLSCAVSGFALSNHGMSWVRRAPGKGLEWVSGIVYSGSTYYAASVKGRFTISRDNSRNTLYLQMNSLRPEDTAIYYCSAHGGESDVWGQGTTVTVSSASGGGGSGGRASGGGGSEIVLTQSPGTLSLSPGERATLSCRASQSIGSSSLAWYQQKPGQAPRLLMYGASSRASGIPDRFSGSGSGTDFTLTISRLEPEDFAVYYCQQYAGSPPFTFGQGTKVEIK

SEQ ID NO: 1052 - DNA, 723 bp, synthetic construct
  misc_feature 1..723: note = Description of Artificial Sequence: Synthetic polynucleotide
  source 1..723: mol_type = other DNA
gaagtgcaattggtggaatctggtggaggacttgtgcaacctggaggatcactgagactgtcatgcgcggtgtccggttttgccctgagcaatcatgggatgtcgtgggtccggcgcgcccccggaaagggtctggaatgggtgtcgggtatcgtctactccgggagcacttactacgccgcgagcgtgaagggccgcttcaccatttcccgcgataactcccgcaacaccctgtacttgcaaatgaactcgctccggcctgaggacactgccatctactactgctccgcacacggaggagaatccgacgtgtggggccagggaactaccgtgaccgtcagcagcgcctccggcggcgggggctcaggcggacgggctagcggcggcggtggctccgagatcgtgctgacccagtcgcctggcactctctcgctgagccccggggaaagggcaaccctgtcctgtcgggccagccagtccattggatcatcctccctcgcctggtatcagcagaaaccgggacaggctccgcggctgcttatgtatggggccagctcaagagcctccggcattcccgaccggttctccgggtccggttccggcaccgatttcaccctgactatctcgaggctggagccagaggacttcgccgtgtactactgccagcagtacgcggggtccccgccgttcacgttcggacagggaaccaaggtcgagatcaag

SEQ ID NO: 1053 - protein, 115 aa, synthetic construct; identical to SEQ ID NO: 969
  REGION 1..115: note = Description of Artificial Sequence: Synthetic polypeptide

SEQ ID NO: 1054 - protein, 109 aa, synthetic construct
  REGION 1..109: note = Description of Artificial Sequence: Synthetic polypeptide
EIVLTQSPGTLSLSPGERATLSCRASQSIGSSSLAWYQQKPGQAPRLLMYGASSRASGIPDRFSGSGSGTDFTLTISRLEPEDFAVYYCQQYAGSPPFTFGQGTKVEIK

SEQ ID NO: 1055 - protein, 485 aa, synthetic construct
  REGION 1..485: note = Description of Artificial Sequence: Synthetic polypeptide
MALPVTALLLPLALLLHAARPEVQLVESGGGLVQPGGSLRLSCAVSGFALSNHGMSWVRRAPGKGLEWVSGIVYSGSTYYAASVKGRFTISRDNSRNTLYLQMNSLRPEDTAIYYCSAHGGESDVWGQGTTVTVSSASGGGGSGGRASGGGGSEIVLTQSPGTLSLSPGERATLSCRASQSIGSSSLAWYQQKPGQAPRLLMYGASSRASGIPDRFSGSGSGTDFTLTISRLEPEDFAVYYCQQYAGSPPFTFGQGTKVEIKTTTPAPRPPTPAPTIASQPLSLRPEACRPAAGGAVHTRGLDFACDIYIWAPLAGTCGVLLLSLVITLYCKRGRKKLLYIFKQPFMRPVQTTQEEDGCSCRFPEEEEGGCELRVKFSRSADAPAYKQGQNQLYNELNLGRREEYDVLDKRRGRDPEMGGKPRRKNPQEGLYNELQKDKMAEAYSEIGMKGERRRGKGHDGLYQGLSTATKDTYDALHMQALPPR

SEQ ID NO: 1056 - DNA, 1455 bp, synthetic construct
  misc_feature 1..1455: note = Description of Artificial Sequence: Synthetic polynucleotide
  source 1..1455: mol_type = other DNA
atggccctccctgtcaccgccctgctgcttccgctggctcttctgctccacgccgctcggcccgaagtgcaattggtggaatctggtggaggacttgtgcaacctggaggatcactgagactgtcatgcgcggtgtccggttttgccctgagcaatcatgggatgtcgtgggtccggcgcgcccccggaaagggtctggaatgggtgtcgggtatcgtctactccgggagcacttactacgccgcgagcgtgaagggccgcttcaccatttcccgcgataactcccgcaacaccctgtacttgcaaatgaactcgctccggcctgaggacactgccatctactactgctccgcacacggaggagaatccgacgtgtggggccagggaactaccgtgaccgtcagcagcgcctccggcggcgggggctcaggcggacgggctagcggcggcggtggctccgagatcgtgctgacccagtcgcctggcactctctcgctgagccccggggaaagggcaaccctgtcctgtcgggccagccagtccattggatcatcctccctcgcctggtatcagcagaaaccgggacaggctccgcggctgcttatgtatggggccagctcaagagcctccggcattcccgaccggttctccgggtccggttccggcaccgatttcaccctgactatctcgaggctggagccagaggacttcgccgtgtactactgccagcagtacgcggggtccccgccgttcacgttcggacagggaaccaaggtcgagatcaagaccactaccccagcaccgaggccacccaccccggctcctaccatcgcctcccagcctctgtccctgcgtccggaggcatgtagacccgcagctggtggggccgtgcatacccggggtcttgacttcgcctgcgatatctacatttgggcccctctggctggtacttgcggggtcctgctgctttcactcgtgatcactctttactgtaagcgcggtcggaagaagctgctgtacatctttaagcaacccttcatgaggcctgtgcagactactcaagaggaggacggctgttcatgccggttcccagaggaggaggaaggcggctgcgaactgcgcgtgaaattcagccgcagcgcagatgctccagcctacaagcaggggcagaaccagctctacaacgaactcaatcttggtcggagagaggagtacgacgtgctggacaagcggagaggacgggacccagaaatgggcgggaagccgcgcagaaagaatccccaagagggcctgtacaacgagctccaaaaggataagatggcagaagcctatagcgagattggtatgaaaggggaacgcagaagaggcaaaggccacgacggactgtaccagggactcagcaccgccaccaaggacacctatgacgctcttcacatgcaggccctgccgcctcgg

SEQ ID NO: 1057 - protein, 243 aa, synthetic construct
  REGION 1..243: note = Description of Artificial Sequence: Synthetic polypeptide
QVQLQESGPGLVKPSETLSLTCTVSGGSISSSYYYWGWIRQPPGKGLEWIGSIYYSGSAYYNPSLKSRVTISVDTSKNQFSLRLSSVTAADTAVYYCARHWQEWPDAFDIWGQGTMVTVSSGGGGSGGGGSGGGGSETTLTQSPAFMSATPGDKVIISCKASQDIDDAMNWYQQKPGEAPLFIIQSATSPVPGIPPRFSGSGFGTDFSLTINNIESEDAAYYFCLQHDNFPLTFGQGTKLEIK

SEQ ID NO: 1058 - DNA, 729 bp, synthetic construct
  misc_feature 1..729: note = Description of Artificial Sequence: Synthetic polynucleotide
  source 1..729: mol_type = other DNA
caagtgcagcttcaggaaagcggaccgggcctggtcaagccatccgaaactctctccctgacttgcactgtgtctggcggttccatctcatcgtcgtactactactggggctggattaggcagccgcccggaaagggactggagtggatcggaagcatctactattccggctcggcgtactacaaccctagcctcaagtcgagagtgaccatctccgtggatacctccaagaaccagttttccctgcgcctgagctccgtgaccgccgctgacaccgccgtgtactactgtgctcggcattggcaggaatggcccgatgccttcgacatttggggccagggcactatggtcactgtgtcatccgggggtggaggcagcgggggaggagggtccggggggggaggttcagagacaaccttgacccagtcacccgcattcatgtccgccactccgggagacaaggtcatcatctcgtgcaaagcgtcccaggatatcgacgatgccatgaattggtaccagcagaagcctggcgaagcgccgctgttcattatccaatccgcaacctcgcccgtgcctggaatcccaccgcggttcagcggcagcggtttcggaaccgacttttccctgaccattaacaacattgagtccgaggacgccgcctactacttctgcctgcaacacgacaacttccctctcacgttcggccagggaaccaagctggaaatcaag

SEQ ID NO: 1059 - protein, 121 aa, synthetic construct
  REGION 1..121: note = Description of Artificial Sequence: Synthetic polypeptide
QVQLQESGPGLVKPSETLSLTCTVSGGSISSSYYYWGWIRQPPGKGLEWIGSIYYSGSAYYNPSLKSRVTISVDTSKNQFSLRLSSVTAADTAVYYCARHWQEWPDAFDIWGQGTMVTVSS

SEQ ID NO: 1060 - protein, 107 aa, synthetic construct
  REGION 1..107: note = Description of Artificial Sequence: Synthetic polypeptide
ETTLTQSPAFMSATPGDKVIISCKASQDIDDAMNWYQQKPGEAPLFIIQSATSPVPGIPPRFSGSGFGTDFSLTINNIESEDAAYYFCLQHDNFPLTFGQGTKLEIK

SEQ ID NO: 1061 - protein, 487 aa, synthetic construct
  REGION 1..487: note = Description of Artificial Sequence: Synthetic polypeptide
MALPVTALLLPLALLLHAARPQVQLQESGPGLVKPSETLSLTCTVSGGSISSSYYYWGWIRQPPGKGLEWIGSIYYSGSAYYNPSLKSRVTISVDTSKNQFSLRLSSVTAADTAVYYCARHWQEWPDAFDIWGQGTMVTVSSGGGGSGGGGSGGGGSETTLTQSPAFMSATPGDKVIISCKASQDIDDAMNWYQQKPGEAPLFIIQSATSPVPGIPPRFSGSGFGTDFSLTINNIESEDAAYYFCLQHDNFPLTFGQGTKLEIKTTTPAPRPPTPAPTIASQPLSLRPEACRPAAGGAVHTRGLDFACDIYIWAPLAGTCGVLLLSLVITLYCKRGRKKLLYIFKQPFMRPVQTTQEEDGCSCRFPEEEEGGCELRVKFSRSADAPAYKQGQNQLYNELNLGRREEYDVLDKRRGRDPEMGGKPRRKNPQEGLYNELQKDKMAEAYSEIGMKGERRRGKGHDGLYQGLSTATKDTYDALHMQALPPR

SEQ ID NO: 1062 - DNA, 1461 bp, synthetic construct
  misc_feature 1..1461: note = Description of Artificial Sequence: Synthetic polynucleotide
  source 1..1461: mol_type = other DNA
atggccctccctgtcaccgccctgctgcttccgctggctcttctgctccacgccgctcggccccaagtgcagcttcaggaaagcggaccgggcctggtcaagccatccgaaactctctccctgacttgcactgtgtctggcggttccatctcatcgtcgtactactactggggctggattaggcagccgcccggaaagggactggagtggatcggaagcatctactattccggctcggcgtactacaaccctagcctcaagtcgagagtgaccatctccgtggatacctccaagaaccagttttccctgcgcctgagctccgtgaccgccgctgacaccgccgtgtactactgtgctcggcattggcaggaatggcccgatgccttcgacatttggggccagggcactatggtcactgtgtcatccgggggtggaggcagcgggggaggagggtccggggggggaggttcagagacaaccttgacccagtcacccgcattcatgtccgccactccgggagacaaggtcatcatctcgtgcaaagcgtcccaggatatcgacgatgccatgaattggtaccagcagaagcctggcgaagcgccgctgttcattatccaatccgcaacctcgcccgtgcctggaatcccaccgcggttcagcggcagcggtttcggaaccgacttttccctgaccattaacaacattgagtccgaggacgccgcctactacttctgcctgcaacacgacaacttccctctcacgttcggccagggaaccaagctggaaatcaagaccactaccccagcaccgaggccacccaccccggctcctaccatcgcctcccagcctctgtccctgcgtccggaggcatgtagacccgcagctggtggggccgtgcatacccggggtcttgacttcgcctgcgatatctacatttgggcccctctggctggtacttgcggggtcctgctgctttcactcgtgatcactctttactgtaagcgcggtcggaagaagctgctgtacatctttaagcaacccttcatgaggcctgtgcagactactcaagaggaggacggctgttcatgccggttcccagaggaggaggaaggcggctgcgaactgcgcgtgaaattcagccgcagcgcagatgctccagcctacaagcaggggcagaaccagctctacaacgaactcaatcttggtcggagagaggagtacgacgtgctggacaagcggagaggacgggacccagaaatgggcgggaagccgcgcagaaagaatccccaagagggcctgtacaacgagctccaaaaggataagatggcagaagcctatagcgagattggtatgaaaggggaacgcagaagaggcaaaggccacgacggactgtaccagggactcagcaccgccaccaaggacacctatgacgctcttcacatgcaggccctgccgcctcgg

SEQ ID NO: 1063 - protein, 244 aa, synthetic construct
  REGION 1..244: note = Description of Artificial Sequence: Synthetic polypeptide
VNLRESGPALVKPTQTLTLTCTFSGFSLRTSGMCVSWIRQPPGKALEWLARIDWDEDKFYSTSLKTRLTISKDTSDNQVVLRMTNMDPADTATYYCARSGAGGTSATAFDIWGPGTMVTVSSGGGGSGGGGSGGGGSDIQMTQSPSSLSASVGDRVTITCRASQDIYNNLAWFQLKPGSAPRSLMYAANKSQSGVPSRFSGSASGTDFTLTISSLQPEDFATYYCQHYYRFPYSFGQGTKLEIK

SEQ ID NO: 1064 - DNA, 735 bp, synthetic construct
  misc_feature 1..735: note = Description of Artificial Sequence: Synthetic polynucleotide
  source 1..735: mol_type = other DNA
caagtcaatctgcgcgaatccggccccgccttggtcaagcctacccagaccctcactctgacctgtactttctccggcttctccctgcggacttccgggatgtgcgtgtcctggatcagacagcctccgggaaaggccctggagtggctcgctcgcattgactgggatgaggacaagttctactccacctcactcaagaccaggctgaccatcagcaaagatacctctgacaaccaagtggtgctccgcatgaccaacatggacccagccgacactgccacttactactgcgcgaggagcggagcgggcggaacctccgccaccgccttcgatatttggggcccgggtaccatggtcaccgtgtcaagcggaggaggggggtccgggggcggcggttccgggggaggcggatcggacattcagatgactcagtcaccatcgtccctgagcgctagcgtgggcgacagagtgacaatcacttgccgggcatcccaggacatctataacaaccttgcgtggttccagctgaagcctggttccgcaccgcggtcacttatgtacgccgccaacaagagccagtcgggagtgccgtcccggttttccggttcggcctcgggaactgacttcaccctgacgatctccagcctgcaacccgaggatttcgccacctactactgccagcactactaccgctttccctactcgttcggacagggaaccaagctggaaatcaag

SEQ ID NO: 1065 - protein, 123 aa, synthetic construct
  REGION 1..123: note = Description of Artificial Sequence: Synthetic polypeptide
QVNLRESGPALVKPTQTLTLTCTFSGFSLRTSGMCVSWIRQPPGKALEWLARIDWDEDKFYSTSLKTRLTISKDTSDNQVVLRMTNMDPADTATYYCARSGAGGTSATAFDIWGPGTMVTVSS

SEQ ID NO: 1066 - protein, 107 aa, synthetic construct
  REGION 1..107: note = Description of Artificial Sequence: Synthetic polypeptide
DIQMTQSPSSLSASVGDRVTITCRASQDIYNNLAWFQLKPGSAPRSLMYAANKSQSGVPSRFSGSASGTDFTLTISSLQPEDFATYYCQHYYRFPYSFGQGTKLEIK

SEQ ID NO: 1067 - protein, 489 aa, synthetic construct
  REGION 1..489: note = Description of Artificial Sequence: Synthetic polypeptide
MALPVTALLLPLALLLHAARPQVNLRESGPALVKPTQTLTLTCTFSGFSLRTSGMCVSWIRQPPGKALEWLARIDWDEDKFYSTSLKTRLTISKDTSDNQVVLRMTNMDPADTATYYCARSGAGGTSATAFDIWGPGTMVTVSSGGGGSGGGGSGGGGSDIQMTQSPSSLSASVGDRVTITCRASQDIYNNLAWFQLKPGSAPRSLMYAANKSQSGVPSRFSGSASGTDFTLTISSLQPEDFATYYCQHYYRFPYSFGQGTKLEIKTTTPAPRPPTPAPTIASQPLSLRPEACRPAAGGAVHTRGLDFACDIYIWAPLAGTCGVLLLSLVITLYCKRGRKKLLYIFKQPFMRPVQTTQEEDGCSCRFPEEEEGGCELRVKFSRSADAPAYKQGQNQLYNELNLGRREEYDVLDKRRGRDPEMGGKPRRKNPQEGLYNELQKDKMAEAYSEIGMKGERRRGKGHDGLYQGLSTATKDTYDALHMQALPPR

SEQ ID NO: 1068 - DNA, 1467 bp, synthetic construct
  misc_feature 1..1467: note = Description of Artificial Sequence: Synthetic polynucleotide
  source 1..1467: mol_type = other DNA
atggccctccctgtcaccgccctgctgcttccgctggctcttctgctccacgccgctcggccccaagtcaatctgcgcgaatccggccccgccttggtcaagcctacccagaccctcactctgacctgtactttctccggcttctccctgcggacttccgggatgtgcgtgtcctggatcagacagcctccgggaaaggccctggagtggctcgctcgcattgactgggatgaggacaagttctactccacctcactcaagaccaggctgaccatcagcaaagatacctctgacaaccaagtggtgctccgcatgaccaacatggacccagccgacactgccacttactactgcgcgaggagcggagcgggcggaacctccgccaccgccttcgatatttggggcccgggtaccatggtcaccgtgtcaagcggaggaggggggtccgggggcggcggttccgggggaggcggatcggacattcagatgactcagtcaccatcgtccctgagcgctagcgtgggcgacagagtgacaatcacttgccgggcatcccaggacatctataacaaccttgcgtggttccagctgaagcctggttccgcaccgcggtcacttatgtacgccgccaacaagagccagtcgggagtgccgtcccggttttccggttcggcctcgggaactgacttcaccctgacgatctccagcctgcaacccgaggatttcgccacctactactgccagcactactaccgctttccctactcgttcggacagggaaccaagctggaaatcaagaccactaccccagcaccgaggccacccaccccggctcctaccatcgcctcccagcctctgtccctgcgtccggaggcatgtagacccgcagctggtggggccgtgcatacccggggtcttgacttcgcctgcgatatctacatttgggcccctctggctggtacttgcggggtcctgctgctttcactcgtgatcactctttactgtaagcgcggtcggaagaagctgctgtacatctttaagcaacccttcatgaggcctgtgcagactactcaagaggaggacggctgttcatgccggttcccagaggaggaggaaggcggctgcgaactgcgcgtgaaattcagccgcagcgcagatgctccagcctacaagcaggggcagaaccagctctacaacgaactcaatcttggtcggagagaggagtacgacgtgctggacaagcggagaggacgggacccagaaatgggcgggaagccgcgcagaaagaatccccaagagggcctgtacaacgagctccaaaaggataagatggcagaagcctatagcgagattggtatgaaaggggaacgcagaagaggcaaaggccacgacggactgtaccagggactcagcaccgccaccaaggacacctatgacgctcttcacatgcaggccctgccgcctcgg

SEQ ID NO: 1069 - protein, 246 aa, synthetic construct
  REGION 1..246: note = Description of Artificial Sequence: Synthetic polypeptide
EVQLVESGGGLVKPGGSLRLSCAASGFTFSSYSMNWVRQAPGKGLEWVSSISSSSSYIYYADSVKGRFTISRDNAKNSLYLQMNSLRAEDTAVYYCAKTIAAVYAFDIWGQGTTVTVSSGGGGSGGGGSGGGGSEIVLTQSPLSLPVTPEEPASISCRSSQSLLHSNGYNYLDWYLQKPGQSPQLLIYLGSNRASGVPDRFSGSGSGTDFTLKISRVEAEDVGVYYCMQALQTPYTFGQGTKLEIK

SEQ ID NO: 1070 - DNA, 738 bp, synthetic construct
  misc_feature 1..738: note = Description of Artificial Sequence: Synthetic polynucleotide
  source 1..738: mol_type = other DNA
gaagtgcagcttgtcgaatccggggggggactggtcaagccgggcggatcactgagactgtcctgcgccgcgagcggcttcacgttctcctcctactccatgaactgggtccgccaagcccccgggaagggactggaatgggtgtcctctatctcctcgtcgtcgtcctacatctactacgccgactccgtgaagggaagattcaccatttcccgcgacaacgcaaagaactcactgtacttgcaaatgaactcactccgggccgaagatactgctgtgtactattgcgccaagactattgccgccgtctacgctttcgacatctggggccagggaaccaccgtgactgtgtcgtccggtggtggtggctcgggcggaggaggaagcggcggcggggggtccgagattgtgctgacccagtcgccactgagcctccctgtgacccccgaggaacccgccagcatcagctgccggtccagccagtccctgctccactccaacggatacaattacctcgattggtaccttcagaagcctggacaaagcccgcagctgctcatctacttgggatcaaaccgcgcgtcaggagtgcctgaccggttctccggctcgggcagcggtaccgatttcaccctgaaaatctccagggtggaggcagaggacgtgggagtgtattactgtatgcaggcgctgcagactccgtacacatttgggcagggcaccaagctggagatcaag

SEQ ID NO: 1071 - protein, 119 aa, synthetic construct
  REGION 1..119: note = Description of Artificial Sequence: Synthetic polypeptide
EVQLVESGGGLVKPGGSLRLSCAASGFTFSSYSMNWVRQAPGKGLEWVSSISSSSSYIYYADSVKGRFTISRDNAKNSLYLQMNSLRAEDTAVYYCAKTIAAVYAFDIWGQGTTVTVSS

SEQ ID NO: 1072 - protein, 112 aa, synthetic construct
  REGION 1..112: note = Description of Artificial Sequence: Synthetic polypeptide
EIVLTQSPLSLPVTPEEPASISCRSSQSLLHSNGYNYLDWYLQKPGQSPQLLIYLGSNRASGVPDRFSGSGSGTDFTLKISRVEAEDVGVYYCMQALQTPYTFGQGTKLEIK

SEQ ID NO: 1073 - protein, 490 aa, synthetic construct
  REGION 1..490: note = Description of Artificial Sequence: Synthetic polypeptide
MALPVTALLLPLALLLHAARPEVQLVESGGGLVKPGGSLRLSCAASGFTFSSYSMNWVRQAPGKGLEWVSSISSSSSYIYYADSVKGRFTISRDNAKNSLYLQMNSLRAEDTAVYYCAKTIAAVYAFDIWGQGTTVTVSSGGGGSGGGGSGGGGSEIVLTQSPLSLPVTPEEPASISCRSSQSLLHSNGYNYLDWYLQKPGQSPQLLIYLGSNRASGVPDRFSGSGSGTDFTLKISRVEAEDVGVYYCMQALQTPYTFGQGTKLEIKTTTPAPRPPTPAPTIASQPLSLRPEACRPAAGGAVHTRGLDFACDIYIWAPLAGTCGVLLLSLVITLYCKRGRKKLLYIFKQPFMRPVQTTQEEDGCSCRFPEEEEGGCELRVKFSRSADAPAYKQGQNQLYNELNLGRREEYDVLDKRRGRDPEMGGKPRRKNPQEGLYNELQKDKMAEAYSEIGMKGERRRGKGHDGLYQGLSTATKDTYDALHMQALPPR

SEQ ID NO: 1074 - DNA, 1470 bp, synthetic construct
  misc_feature 1..1470: note = Description of Artificial Sequence: Synthetic polynucleotide
  source 1..1470: mol_type = other DNA
atggccctccctgtcaccgccctgctgcttccgctggctcttctgctccacgccgctcggcccgaagtgcagcttgtcgaatccggggggggactggtcaagccgggcggatcactgagactgtcctgcgccgcgagcggcttcacgttctcctcctactccatgaactgggtccgccaagcccccgggaagggactggaatgggtgtcctctatctcctcgtcgtcgtcctacatctactacgccgactccgtgaagggaagattcaccatttcccgcgacaacgcaaagaactcactgtacttgcaaatgaactcactccgggccgaagatactgctgtgtactattgcgccaagactattgccgccgtctacgctttcgacatctggggccagggaaccaccgtgactgtgtcgtccggtggtggtggctcgggcggaggaggaagcggcggcggggggtccgagattgtgctgacccagtcgccactgagcctccctgtgacccccgaggaacccgccagcatcagctgccggtccagccagtccctgctccactccaacggatacaattacctcgattggtaccttcagaagcctggacaaagcccgcagctgctcatctacttgggatcaaaccgcgcgtcaggagtgcctgaccggttctccggctcgggcagcggtaccgatttcaccctgaaaatctccagggtggaggcagaggacgtgggagtgtattactgtatgcaggcgctgcagactccgtacacatttgggcagggcaccaagctggagatcaagaccactaccccagcaccgaggccacccaccccggctcctaccatcgcctcccagcctctgtccctgcgtccggaggcatgtagacccgcagctggtggggccgtgcatacccggggtcttgacttcgcctgcgatatctacatttgggcccctctggctggtacttgcggggtcctgctgctttcactcgtgatcactctttactgtaagcgcggtcggaagaagctgctgtacatctttaagcaacccttcatgaggcctgtgcagactactcaagaggaggacggctgttcatgccggttcccagaggaggaggaaggcggctgcgaactgcgcgtgaaattcagccgcagcgcagatgctccagcctacaagcaggggcagaaccagctctacaacgaactcaatcttggtcggagagaggagtacgacgtgctggacaagcggagaggacgggacccagaaatgggcgggaagccgcgcagaaagaatccccaagagggcctgtacaacgagctccaaaaggataagatggcagaagcctatagcgagattggtatgaaaggggaacgcagaagaggcaaaggccacgacggactgtaccagggactcagcaccgccaccaaggacacctatgacgctcttcacatgcaggccctgccgcctcgg

SEQ ID NO: 1075 - protein, 240 aa, synthetic construct
  REGION 1..240: note = Description of Artificial Sequence: Synthetic polypeptide
EVQLVESGGGLVKPGGSLRLSCAASGFTFSDYYMSWIRQAPGKGLEWVSYISSSGSTIYYADSVKGRFTISRDNAKNSLYLQMNSLRAEDTAVYYCARDLRGAFDIWGQGTMVTVSSGGGGSGGGGSGGGGSSYVLTQSPSVSAAPGYTATISCGGNNIGTKSVHWYQQKPGQAPLLVIRDDSVRPSKIPGRFSGSNSGNMATLTISGVQAGDEADFYCQVWDSDSEHVVFGGGTKLTVL

SEQ ID NO: 1076 - DNA, 720 bp, synthetic construct
  misc_feature 1..720: note = Description of Artificial Sequence: Synthetic polynucleotide
  source 1..720: mol_type = other DNA
gaagtccagctcgtggagtccggcggaggccttgtgaagcctggaggttcgctgagactgtcctgcgccgcctccggcttcaccttctccgactactacatgtcctggatcagacaggccccgggaaagggcctggaatgggtgtcctacatctcgtcatcgggcagcactatctactacgcggactcagtgaaggggcggttcaccatttcccgggataacgcgaagaactcgctgtatctgcaaatgaactcactgagggccgaggacaccgccgtgtactactgcgcccgcgatctccgcggggcatttgacatctggggacagggaaccatggtcacagtgtccagcggagggggaggatcgggtggcggaggttccgggggtggaggctcctcctacgtgctgactcagagcccaagcgtcagcgctgcgcccggttacacggcaaccatctcctgtggcggaaacaacattgggaccaagtctgtgcactggtatcagcagaagccgggccaagctcccctgttggtgatccgcgatgactccgtgcggcctagcaaaattccgggacggttctccggctccaacagcggcaatatggccactctcaccatctcgggagtgcaggccggagatgaagccgacttctactgccaagtctgggactcagactccgagcatgtggtgttcgggggcggaaccaagctgactgtgctc

SEQ ID NO: 1077 - protein, 117 aa, synthetic construct
  REGION 1..117: note = Description of Artificial Sequence: Synthetic polypeptide
EVQLVESGGGLVKPGGSLRLSCAASGFTFSDYYMSWIRQAPGKGLEWVSYISSSGSTIYYADSVKGRFTISRDNAKNSLYLQMNSLRAEDTAVYYCARDLRGAFDIWGQGTMVTVSS

SEQ ID NO: 1078 - protein, 108 aa, synthetic construct
  REGION 1..108: note = Description of Artificial Sequence: Synthetic polypeptide
SYVLTQSPSVSAAPGYTATISCGGNNIGTKSVHWYQQKPGQAPLLVIRDDSVRPSKIPGRFSGSNSGNMATLTISGVQAGDEADFYCQVWDSDSEHVVFGGGTKLTVL

SEQ ID NO: 1079 - protein, 484 aa, synthetic construct
  REGION 1..484: note = Description of Artificial Sequence: Synthetic polypeptide
MALPVTALLLPLALLLHAARPEVQLVESGGGLVKPGGSLRLSCAASGFTFSDYYMSWIRQAPGKGLEWVSYISSSGSTIYYADSVKGRFTISRDNAKNSLYLQMNSLRAEDTAVYYCARDLRGAFDIWGQGTMVTVSSGGGGSGGGGSGGGGSSYVLTQSPSVSAAPGYTATISCGGNNIGTKSVHWYQQKPGQAPLLVIRDDSVRPSKIPGRFSGSNSGNMATLTISGVQAGDEADFYCQVWDSDSEHVVFGGGTKLTVLTTTPAPRPPTPAPTIASQPLSLRPEACRPAAGGAVHTRGLDFACDIYIWAPLAGTCGVLLLSLVITLYCKRGRKKLLYIFKQPFMRPVQTTQEEDGCSCRFPEEEEGGCELRVKFSRSADAPAYKQGQNQLYNELNLGRREEYDVLDKRRGRDPEMGGKPRRKNPQEGLYNELQKDKMAEAYSEIGMKGERRRGKGHDGLYQGLSTATKDTYDALHMQALPPR

SEQ ID NO: 1080 - DNA, 1452 bp, synthetic construct
  misc_feature 1..1452: note = Description of Artificial Sequence: Synthetic polynucleotide
  source 1..1452: mol_type = other DNA
atggccctccctgtcaccgccctgctgcttccgctggctcttctgctccacgccgctcggcccgaagtccagctcgtggagtccggcggaggccttgtgaagcctggaggttcgctgagactgtcctgcgccgcctccggcttcaccttctccgactactacatgtcctggatcagacaggccccgggaaagggcctggaatgggtgtcctacatctcgtcatcgggcagcactatctactacgcggactcagtgaaggggcggttcaccatttcccgggataacgcgaagaactcgctgtatctgcaaatgaactcactgagggccgaggacaccgccgtgtactactgcgcccgcgatctccgcggggcatttgacatctggggacagggaaccatggtcacagtgtccagcggagggggaggatcgggtggcggaggttccgggggtggaggctcctcctacgtgctgactcagagcccaagcgtcagcgctgcgcccggttacacggcaaccatctcctgtggcggaaacaacattgggaccaagtctgtgcactggtatcagcagaagccgggccaagctcccctgttggtgatccgcgatgactccgtgcggcctagcaaaattccgggacggttctccggctccaacagcggcaatatggccactctcaccatctcgggagtgcaggccggagatgaagccgacttctactgccaagtctgggactcagactccgagcatgtggtgttcgggggcggaaccaagctgactgtgctcaccactaccccagcaccgaggccacccaccccggctcctaccatcgcctcccagcctctgtccctgcgtccggaggcatgtagacccgcagctggtggggccgtgcatacccggggtcttgacttcgcctgcgatatctacatttgggcccctctggctggtacttgcggggtcctgctgctttcactcgtgatcactctttactgtaagcgcggtcggaagaagctgctgtacatctttaagcaacccttcatgaggcctgtgcagactactcaagaggaggacggctgttcatgccggttcccagaggaggaggaaggcggctgcgaactgcgcgtgaaattcagccgcagcgcagatgctccagcctacaagcaggggcagaaccagctctacaacgaactcaatcttggtcggagagaggagtacgacgtgctggacaagcggagaggacgggacccagaaatgggcgggaagccgcgcagaaagaatccccaagagggcctgtacaacgagctccaaaaggataagatggcagaagcctatagcgagattggtatgaaaggggaacgcagaagaggcaaaggccacgacggactgtaccagggactcagcaccgccaccaaggacacctatgacgctcttcacatgcaggccctgccgcctcgg

SEQ ID NO: 1081 - protein, 241 aa, synthetic construct
  REGION 1..241: note = Description of Artificial Sequence: Synthetic polypeptide
QVQLVQSGAEVKKPGASVKVSCKPSGYTVTSHYIHWVRRAPGQGLEWMGMINPSGGVTAYSQTLQGRVTMTSDTSSSTVYMELSSLRSEDTAMYYCAREGSGSGWYFDFWGRGTLVTVSSGGGGSGGGGSGGGGSSYVLTQPPSVSVSPGQTASITCSGDGLSKKYVSWYQQKAGQSPVVLISRDKERPSGIPDRFSGSNSADTATLTISGTQAMDEADYYCQAWDDTTVVFGGGTKLTVL

SEQ ID NO: 1082 - DNA, 723 bp, synthetic construct
  misc_feature 1..723: note = Description of Artificial Sequence: Synthetic polynucleotide
  source 1..723: mol_type = other DNA
caagtgcagctggtgcagagcggggccgaagtcaagaagccgggagcctccgtgaaagtgtcctgcaagccttcgggatacaccgtgacctcccactacattcattgggtccgccgcgcccccggccaaggactcgagtggatgggcatgatcaaccctagcggcggagtgaccgcgtacagccagacgctgcagggacgcgtgactatgacctcggatacctcctcctccaccgtctatatggaactgtccagcctgcggtccgaggataccgccatgtactactgcgcccgggaaggatcaggctccgggtggtatttcgacttctggggaagaggcaccctcgtgactgtgtcatctgggggagggggttccggtggtggcggatcgggaggaggcggttcatcctacgtgctgacccagccaccctccgtgtccgtgagccccggccagactgcatcgattacatgtagcggcgacggcctctccaagaaatacgtgtcgtggtaccagcagaaggccggacagagcccggtggtgctgatctcaagagataaggagcggcctagcggaatcccggacaggttctcgggttccaactccgcggacactgctactctgaccatctcggggacccaggctatggacgaagccgattactactgccaagcctgggacgacactactgtcgtgtttggagggggcaccaagttgaccgtcctt

SEQ ID NO: 1083 - protein, 120 aa, synthetic construct
  REGION 1..120: note = Description of Artificial Sequence: Synthetic polypeptide
QVQLVQSGAEVKKPGASVKVSCKPSGYTVTSHYIHWVRRAPGQGLEWMGMINPSGGVTAYSQTLQGRVTMTSDTSSSTVYMELSSLRSEDTAMYYCAREGSGSGWYFDFWGRGTLVTVSS

SEQ ID NO: 1084 - protein, 106 aa, synthetic construct
  REGION 1..106: note = Description of Artificial Sequence: Synthetic polypeptide
SYVLTQPPSVSVSPGQTASITCSGDGLSKKYVSWYQQKAGQSPVVLISRDKERPSGIPDRFSGSNSADTATLTISGTQAMDEADYYCQAWDDTTVVFGGGTKLTVL

SEQ ID NO: 1085 - protein, 485 aa, synthetic construct
  REGION 1..485: note = Description of Artificial Sequence: Synthetic polypeptide
MALPVTALLLPLALLLHAARPQVQLVQSGAEVKKPGASVKVSCKPSGYTVTSHYIHWVRRAPGQGLEWMGMINPSGGVTAYSQTLQGRVTMTSDTSSSTVYMELSSLRSEDTAMYYCAREGSGSGWYFDFWGRGTLVTVSSGGGGSGGGGSGGGGSSYVLTQPPSVSVSPGQTASITCSGDGLSKKYVSWYQQKAGQSPVVLISRDKERPSGIPDRFSGSNSADTATLTISGTQAMDEADYYCQAWDDTTVVFGGGTKLTVLTTTPAPRPPTPAPTIASQPLSLRPEACRPAAGGAVHTRGLDFACDIYIWAPLAGTCGVLLLSLVITLYCKRGRKKLLYIFKQPFMRPVQTTQEEDGCSCRFPEEEEGGCELRVKFSRSADAPAYKQGQNQLYNELNLGRREEYDVLDKRRGRDPEMGGKPRRKNPQEGLYNELQKDKMAEAYSEIGMKGERRRGKGHDGLYQGLSTATKDTYDALHMQALPPR

SEQ ID NO: 1086 - DNA, 1455 bp, synthetic construct
  misc_feature 1..1455: note = Description of Artificial Sequence: Synthetic polynucleotide
  source 1..1455: mol_type = other DNA
atggccctccctgtcaccgccctgctgcttccgctggctcttctgctccacgccgctcggccccaagtgcagctggtgcagagcggggccgaagtcaagaagccgggagcctccgtgaaagtgtcctgcaagccttcgggatacaccgtgacctcccactacattcattgggtccgccgcgcccccggccaaggactcgagtggatgggcatgatcaaccctagcggcggagtgaccgcgtacagccagacgctgcagggacgcgtgactatgacctcggatacctcctcctccaccgtctatatggaactgtccagcctgcggtccgaggataccgccatgtactactgcgcccgggaaggatcaggctccgggtggtatttcgacttctggggaagaggcaccctcgtgactgtgtcatctgggggagggggttccggtggtggcggatcgggaggaggcggttcatcctacgtgctgacccagccaccctccgtgtccgtgagccccggccagactgcatcgattacatgtagcggcgacggcctctccaagaaatacgtgtcgtggtaccagcagaaggccggacagagcccggtggtgctgatctcaagagataaggagcggcctagcggaatcccggacaggttctcgggttccaactccgcggacactgctactctgaccatctcggggacccaggctatggacgaagccgattactactgccaagcctgggacgacactactgtcgtgtttggagggggcaccaagttgaccgtccttaccactaccccagcaccgaggccacccaccccggctcctaccatcgcctcccagcctctgtccctgcgtccggaggcatgtagacccgcagctggtggggccgtgcatacccggggtcttgacttcgcctgcgatatctacatttgggcccctctggctggtacttgcggggtcctgctgctttcactcgtgatcactctttactgtaagcgcggtcggaagaagctgctgtacatctttaagcaacccttcatgaggcctgtgcagactactcaagaggaggacggctgttcatgccggttcccagaggaggaggaaggcggctgcgaactgcgcgtgaaattcagccgcagcgcagatgctccagcctacaagcaggggcagaaccagctctacaacgaactcaatcttggtcggagagaggagtacgacgtgctggacaagcggagaggacgggacccagaaatgggcgggaagccgcgcagaaagaatccccaagagggcctgtacaacgagctccaaaaggataagatggcagaagcctatagcgagattggtatgaaaggggaacgcagaagaggcaaaggccacgacggactgtaccagggactcagcaccgccaccaaggacacctatgacgctcttcacatgcaggccctgccgcctcgg

SEQ ID NO: 1087 - protein, 245 aa, synthetic construct
  REGION 1..245: note = Description of Artificial Sequence: Synthetic polypeptide
QVQLQESGPGLVKPSQTLSLTCTVSGGSISSGGYYWSWIRQHPGKGLEWIGYIYYSGSTYYNPSLKSRVTISVDTSKNQFSLKLSSVTAADTAVYYCARAGIAARLRGAFDIWGQGTMVTVSSGGGGSGGGGSGGGGSDIVMTQSPSSVSASVGDRVIITCRASQGIRNWLAWYQQKPGKAPNLLIYAASNLQSGVPSRFSGSGSGADFTLTISSLQPEDVATYYCQKYNSAPFTFGPGTKVDIK

SEQ ID NO: 1088 - DNA, 735 bp, synthetic construct
  misc_feature 1..735: note = Description of Artificial Sequence: Synthetic polynucleotide
  source 1..735: mol_type = other DNA
caagtgcagcttcaggagagcggcccgggactcgtgaagccgtcccagaccctgtccctgacttgcaccgtgtcgggaggaagcatctcgagcggaggctactattggtcgtggattcggcagcaccctggaaagggcctggaatggatcggctacatctactactccggctcgacctactacaacccatcgctgaagtccagagtgacaatctcagtggacacgtccaagaatcagttcagcctgaagctctcttccgtgactgcggccgacaccgccgtgtactactgcgcacgcgctggaattgccgcccggctgaggggtgccttcgacatttggggacagggcaccatggtcaccgtgtcctccggcggcggaggttccgggggtggaggctcaggaggaggggggtccgacatcgtcatgactcagtcgccctcaagcgtcagcgcgtccgtcggggacagagtgatcatcacctgtcgggcgtcccagggaattcgcaactggctggcctggtatcagcagaagcccggaaaggcccccaacctgttgatctacgccgcctcaaacctccaatccggggtgccgagccgcttcagcggctccggttcgggtgccgatttcactctgaccatctcctccctgcaacctgaagatgtggctacctactactgccaaaagtacaactccgcaccttttactttcggaccggggaccaaagtggacattaag

SEQ ID NO: 1089 - protein, 123 aa, synthetic construct
  REGION 1..123: note = Description of Artificial Sequence: Synthetic polypeptide
QVQLQESGPGLVKPSQTLSLTCTVSGGSISSGGYYWSWIRQHPGKGLEWIGYIYYSGSTYYNPSLKSRVTISVDTSKNQFSLKLSSVTAADTAVYYCARAGIAARLRGAFDIWGQGTMVTVSS

SEQ ID NO: 1090 - protein, 107 aa, synthetic construct
  REGION 1..107: note = Description of Artificial Sequence: Synthetic polypeptide
DIVMTQSPSSVSASVGDRVIITCRASQGIRNWLAWYQQKPGKAPNLLIYAASNLQSGVPSRFSGSGSGADFTLTISSLQPEDVATYYCQKYNSAPFTFGPGTKVDIK

SEQ ID NO: 1091 - protein, 489 aa, synthetic construct
  REGION 1..489: note = Description of Artificial Sequence: Synthetic polypeptide
MALPVTALLLPLALLLHAARPQVQLQESGPGLVKPSQTLSLTCTVSGGSISSGGYYWSWIRQHPGKGLEWIGYIYYSGSTYYNPSLKSRVTISVDTSKNQFSLKLSSVTAADTAVYYCARAGIAARLRGAFDIWGQGTMVTVSSGGGGSGGGGSGGGGSDIVMTQSPSSVSASVGDRVIITCRASQGIRNWLAWYQQKPGKAPNLLIYAASNLQSGVPSRFSGSGSGADFTLTISSLQPEDVATYYCQKYNSAPFTFGPGTKVDIKTTTPAPRPPTPAPTIASQPLSLRPEACRPAAGGAVHTRGLDFACDIYIWAPLAGTCGVLLLSLVITLYCKRGRKKLLYIFKQPFMRPVQTTQEEDGCSCRFPEEEEGGCELRVKFSRSADAPAYKQGQNQLYNELNLGRREEYDVLDKRRGRDPEMGGKPRRKNPQEGLYNELQKDKMAEAYSEIGMKGERRRGKGHDGLYQGLSTATKDTYDALHMQALPPR

SEQ ID NO: 1092 - DNA, 1467 bp, synthetic construct
  misc_feature 1..1467: note = Description of Artificial Sequence: Synthetic polynucleotide
  source 1..1467: mol_type = other DNA
atggccctccctgtcaccgccctgctgcttccgctggctcttctgctccacgccgctcggccccaagtgcagcttcaggagagcggcccgggactcgtgaagccgtcccagaccctgtccctgacttgcaccgtgtcgggaggaagcatctcgagcggaggctactattggtcgtggattcggcagcaccctggaaagggcctggaatggatcggctacatctactactccggctcgacctactacaacccatcgctgaagtccagagtgacaatctcagtggacacgtccaagaatcagttcagcctgaagctctcttccgtgactgcggccgacaccgccgtgtactactgcgcacgcgctggaattgccgcccggctgaggggtgccttcgacatttggggacagggcaccatggtcaccgtgtcctccggcggcggaggttccgggggtggaggctcaggaggaggggggtccgacatcgtcatgactcagtcgccctcaagcgtcagcgcgtccgtcggggacagagtgatcatcacctgtcgggcgtcccagggaattcgcaactggctggcctggtatcagcagaagcccggaaaggcccccaacctgttgatctacgccgcctcaaacctccaatccggggtgccgagccgcttcagcggctccggttcgggtgccgatttcactctgaccatctcctccctgcaacctgaagatgtggctacctactactgccaaaagtacaactccgcaccttttactttcggaccggggaccaaagtggacattaagaccactaccccagcaccgaggccacccaccccggctcctaccatcgcctcccagcctctgtccctgcgtccggaggcatgtagacccgcagctggtggggccgtgcatacccggggtcttgacttcgcctgcgatatctacatttgggcccctctggctggtacttgcggggtcctgctgctttcactcgtgatcactctttactgtaagcgcggtcggaagaagctgctgtacatctttaagcaacccttcatgaggcctgtgcagactactcaagaggaggacggctgttcatgccggttcccagaggaggaggaaggcggctgcgaactgcgcgtgaaattcagccgcagcgcagatgctccagcctacaagcaggggcagaaccagctctacaacgaactcaatcttggtcggagagaggagtacgacgtgctggacaagcggagaggacgggacccagaaatgggcgggaagccgcgcagaaagaatccccaagagggcctgtacaacgagctccaaaaggataagatggcagaagcctatagcgagattggtatgaaaggggaacgcagaagaggcaaaggccacgacggactgtaccagggactcagcaccgccaccaaggacacctatgacgctcttcacatgcaggccctgccgcctcgg

SEQ ID NO: 1093 - protein, 253 aa, synthetic construct
  REGION 1..253: note = Description of Artificial Sequence: Synthetic polypeptide
QVQLVQSGAEVKKPGSSVKVSCKASGGTFSSYAISWVRQAPGQGLEWMGGIIPIFGTANYAQKFQGRVTITADESTSTAYMELSSLRSEDTAVYYCARRGGYQLLRWDVGLLRSAFDIWGQGTMVTVSSGGGGSGGGGSGGGGSSYVLTQPPSVSVAPGQTARITCGGNNIGSKSVHWYQQKPGQAPVLVLYGKNNRPSGVPDRFSGSRSGTTASLTITGAQAEDEADYYCSSRDSSGDHLRVFGTGTKVTVL

SEQ ID NO: 1094 - DNA, 759 bp, synthetic construct
  misc_feature 1..759: note = Description of Artificial Sequence: Synthetic polynucleotide
  source 1..759: mol_type = other DNA
caagtgcagctggtccagtcgggcgccgaggtcaagaagcccgggagctctgtgaaagtgtcctgcaaggcctccgggggcacctttagctcctacgccatctcctgggtccgccaagcaccgggtcaaggcctggagtggatggggggaattatccctatcttcggcactgccaactacgcccagaagttccagggacgcgtgaccattaccgcggacgaatccacctccaccgcttatatggagctgtccagcttgcgctcggaagataccgccgtgtactactgcgcccggaggggtggataccagctgctgagatgggacgtgggcctcctgcggtcggcgttcgacatctggggccagggcactatggtcactgtgtccagcggaggaggcggatcgggaggcggcggatcagggggaggcggttccagctacgtgcttactcaacccccttcggtgtccgtggccccgggacagaccgccagaatcacttgcggaggaaacaacattgggtccaagagcgtgcattggtaccagcagaagccaggacaggcccctgtgctggtgctctacgggaagaacaatcggcccagcggagtgccggacaggttctcgggttcacgctccggtacaaccgcttcactgactatcaccggggcccaggcagaggatgaagcggactactactgttcctcccgggattcatccggcgaccacctccgggtgttcggaaccggaacgaaggtcaccgtgctg

SEQ ID NO: 1095 - protein, 129 aa, synthetic construct
  REGION 1..129: note = Description of Artificial Sequence: Synthetic polypeptide
QVQLVQSGAEVKKPGSSVKVSCKASGGTFSSYAISWVRQAPGQGLEWMGGIIPIFGTANYAQKFQGRVTITADESTSTAYMELSSLRSEDTAVYYCARRGGYQLLRWDVGLLRSAFDIWGQGTMVTVSS

SEQ ID NO: 1096 - protein, 109 aa, synthetic construct
  REGION 1..109: note = Description of Artificial Sequence: Synthetic polypeptide
SYVLTQPPSVSVAPGQTARITCGGNNIGSKSVHWYQQKPGQAPVLVLYGKNNRPSGVPDRFSGSRSGTTASLTITGAQAEDEADYYCSSRDSSGDHLRVFGTGTKVTVL

SEQ ID NO: 1097 - protein, 497 aa, synthetic construct
  REGION 1..497: note = Description of Artificial Sequence: Synthetic polypeptide
MALPVTALLLPLALLLHAARPQVQLVQSGAEVKKPGSSVKVSCKASGGTFSSYAISWVRQAPGQGLEWMGGIIPIFGTANYAQKFQGRVTITADESTSTAYMELSSLRSEDTAVYYCARRGGYQLLRWDVGLLRSAFDIWGQGTMVTVSSGGGGSGGGGSGGGGSSYVLTQPPSVSVAPGQTARITCGGNNIGSKSVHWYQQKPGQAPVLVLYGKNNRPSGVPDRFSGSRSGTTASLTITGAQAEDEADYYCSSRDSSGDHLRVFGTGTKVTVLTTTPAPRPPTPAPTIASQPLSLRPEACRPAAGGAVHTRGLDFACDIYIWAPLAGTCGVLLLSLVITLYCKRGRKKLLYIFKQPFMRPVQTTQEEDGCSCRFPEEEEGGCELRVKFSRSADAPAYKQGQNQLYNELNLGRREEYDVLDKRRGRDPEMGGKPRRKNPQEGLYNELQKDKMAEAYSEIGMKGERRRGKGHDGLYQGLSTATKDTYDALHMQALPPR

SEQ ID NO: 1098 - DNA, 1491 bp, synthetic construct
  misc_feature 1..1491: note = Description of Artificial Sequence: Synthetic polynucleotide
  source 1..1491: mol_type = other DNA
atggccctccctgtcaccgccctgctgcttccgctggctcttctgctccacgccgctcggccccaagtgcagctggtccagtcgggcgccgaggtcaagaagcccgggagctctgtgaaagtgtcctgcaaggcctccgggggcacctttagctcctacgccatctcctgggtccgccaagcaccgggtcaaggcctggagtggatggggggaattatccctatcttcggcactgccaactacgcccagaagttccagggacgcgtgaccattaccgcggacgaatccacctccaccgcttatatggagctgtccagcttgcgctcggaagataccgccgtgtactactgcgcccggaggggtggataccagctgctgagatgggacgtgggcctcctgcggtcggcgttcgacatctggggccagggcactatggtcactgtgtccagcggaggaggcggatcgggaggcggcggatcagggggaggcggttccagctacgtgcttactcaacccccttcggtgtccgtggccccgggacagaccgccagaatcacttgcggaggaaacaacattgggtccaagagcgtgcattggtaccagcagaagccaggacaggcccctgtgctggtgctctacgggaagaacaatcggcccagcggagtgccggacaggttctcgggttcacgctccggtacaaccgcttcactgactatcaccggggcccaggcagaggatgaagcggactactactgttcctcccgggattcatccggcgaccacctccgggtgttcggaaccggaacgaaggtcaccgtgctgaccactaccccagcaccgaggccacccaccccggctcctaccatcgcctcccagcctctgtccctgcgtccggaggcatgtagacccgcagctggtggggccgtgcatacccggggtcttgacttcgcctgcgatatctacatttgggcccctctggctggtacttgcggggtcctgctgctttcactcgtgatcactctttactgtaagcgcggtcggaagaagctgctgtacatctttaagcaacccttcatgaggcctgtgcagactactcaagaggaggacggctgttcatgccggttcccagaggaggaggaaggcggctgcgaactgcgcgtgaaattcagccgcagcgcagatgctccagcctacaagcaggggcagaaccagctctacaacgaactcaatcttggtcggagagaggagtacgacgtgctggacaagcggagaggacgggacccagaaatgggcgggaagccgcgcagaaagaatccccaagagggcctgtacaacgagctccaaaaggataagatggcagaagcctatagcgagattggtatgaaaggggaacgcagaagaggcaaaggccacgacggactgtaccagggactcagcaccgccaccaaggacacctatgacgctcttcacatgcaggccctgccgcctcgg

SEQ ID NO: 1099 - protein, 248 aa, synthetic construct
  REGION 1..248: note = Description of Artificial Sequence: Synthetic polypeptide
EVQLQQSGPGLVKPSQTLSLTCAISGDSVSSNSAAWNWIRQSPSRGLEWLGRTYYRSKWYSFYAISLKSRIIINPDTSKNQFSLQLKSVTPEDTAVYYCARSSPEGLFLYWFDPWGQGTLVTVSSGGDGSGGGGSGGGGSSSELTQDPAVSVALGQTIRITCQGDSLGNYYATWYQQKPGQAPVLVIYGTNNRPSGIPDRFSASSSGNTASLTITGAQAEDEADYYCNSRDSSGHHLLFGTGTKVTVL

SEQ ID NO: 1100 - DNA, 744 bp, synthetic construct
  misc_feature 1..744: note = Description of Artificial Sequence: Synthetic polynucleotide
  source 1..744: mol_type = other DNA
gaagtgcagctccaacagtcaggaccggggctcgtgaagccatcccagaccctgtccctgacttgtgccatctcgggagatagcgtgtcatcgaactccgccgcctggaactggattcggcagagcccgtcccgcggactggagtggcttggaaggacctactaccggtccaagtggtactctttctacgcgatctcgctgaagtcccgcattatcattaaccctgatacctccaagaatcagttctccctccaactgaaatccgtcacccccgaggacacagcagtgtattactgcgcacggagcagccccgaaggactgttcctgtattggtttgacccctggggccaggggactcttgtgaccgtgtcgagcggcggagatgggtccggtggcggtggttcggggggcggcggatcatcatccgaactgacccaggacccggctgtgtccgtggcgctgggacaaaccatccgcattacgtgccagggagactccctgggcaactactacgccacttggtaccagcagaagccgggccaagcccctgtgttggtcatctacgggaccaacaacagaccttccggcatccccgaccggttcagcgcttcgtcctccggcaacactgccagcctgaccatcactggagcgcaggccgaagatgaggccgactactactgcaacagcagagactcctcgggtcatcacctcttgttcggaactggaaccaaggtcaccgtgctg

SEQ ID NO: 1101 - protein, 125 aa, synthetic construct
  REGION 1..125: note = Description of Artificial Sequence: Synthetic polypeptide
EVQLQQSGPGLVKPSQTLSLTCAISGDSVSSNSAAWNWIRQSPSRGLEWLGRTYYRSKWYSFYAISLKSRIIINPDTSKNQFSLQLKSVTPEDTAVYYCARSSPEGLFLYWFDPWGQGTLVTVSS

SEQ ID NO: 1102 - protein, 108 aa, synthetic construct
  REGION 1..108: note = Description of Artificial Sequence: Synthetic polypeptide
SSELTQDPAVSVALGQTIRITCQGDSLGNYYATWYQQKPGQAPVLVIYGTNNRPSGIPDRFSASSSGNTASLTITGAQAEDEADYYCNSRDSSGHHLLFGTGTKVTVL

SEQ ID NO: 1103 - protein, 492 aa, synthetic construct
  REGION 1..492: note = Description of Artificial Sequence: Synthetic polypeptide
MALPVTALLLPLALLLHAARPEVQLQQSGPGLVKPSQTLSLTCAISGDSVSSNSAAWNWIRQSPSRGLEWLGRTYYRSKWYSFYAISLKSRIIINPDTSKNQFSLQLKSVTPEDTAVYYCARSSPEGLFLYWFDPWGQGTLVTVSSGGDGSGGGGSGGGGSSSELTQDPAVSVALGQTIRITCQGDSLGNYYATWYQQKPGQAPVLVIYGTNNRPSGIPDRFSASSSGNTASLTITGAQAEDEADYYCNSRDSSGHHLLFGTGTKVTVLTTTPAPRPPTPAPTIASQPLSLRPEACRPAAGGAVHTRGLDFACDIYIWAPLAGTCGVLLLSLVITLYCKRGRKKLLYIFKQPFMRPVQTTQEEDGCSCRFPEEEEGGCELRVKFSRSADAPAYKQGQNQLYNELNLGRREEYDVLDKRRGRDPEMGGKPRRKNPQEGLYNELQKDKMAEAYSEIGMKGERRRGKGHDGLYQGLSTATKDTYDALHMQALPPR

SEQ ID NO: 1104 - DNA, 1476 bp, synthetic construct
  misc_feature 1..1476: note = Description of Artificial Sequence: Synthetic polynucleotide
  source 1..1476: mol_type = other DNA
atggccctccctgtcaccgccctgctgcttccgctggctcttctgctccacgccgctcggcccgaagtgcagctccaacagtcaggaccggggctcgtgaagccatcccagaccctgtccctgacttgtgccatctcgggagatagcgtgtcatcgaactccgccgcctggaactggattcggcagagcccgtcccgcggactggagtggcttggaaggacctactaccggtccaagtggtactctttctacgcgatctcgctgaagtcccgcattatcattaaccctgatacctccaagaatcagttctccctccaactgaaatccgtcacccccgaggacacagcagtgtattactgcgcacggagcagccccgaaggactgttcctgtattggtttgacccctggggccaggggactcttgtgaccgtgtcgagcggcggagatgggtccggtggcggtggttcggggggcggcggatcatcatccgaactgacccaggacccggctgtgtccgtggcgctgggacaaaccatccgcattacgtgccagggagactccctgggcaactactacgccacttggtaccagcagaagccgggccaagcccctgtgttggtcatctacgggaccaacaacagaccttccggcatccccgaccggttcagcgcttcgtcctccggcaacactgccagcctgaccatcactggagcgcaggccgaagatgaggccgactactactgcaacagcagagactcctcgggtcatcacctcttgttcggaactggaaccaaggtcaccgtgctgaccactaccccagcaccgaggccacccaccccggctcctaccatcgcctcccagcctctgtccctgcgtccggaggcatgtagacccgcagctggtggggccgtgcatacccggggtcttgacttcgcctgcgatatctacatttgggcccctctggctggtacttgcggggtcctgctgctttcactcgtgatcactctttactgtaagcgcggtcggaagaagctgctgtacatctttaagcaacccttcatgaggcctgtgcagactactcaagaggaggacggctgttcatgccggttcccagaggaggaggaaggcggctgcgaactgcgcgtgaaattcagccgcagcgcagatgctccagcctacaagcaggggcagaaccagctctacaacgaactcaatcttggtcggagagaggagtacgacgtgctggacaagcggagaggacgggacccagaaatgggcgggaagccgcgcagaaagaatccccaagagggcctgtacaacgagctccaaaaggataagatggcagaagcctatagcgagattggtatgaaaggggaacgcagaagaggcaaaggccacgacggactgtaccagggactcagcaccgccaccaaggacacctatgacgctcttcacatgcaggccctgccgcctcgg

SEQ ID NO: 1105 - protein, 246 aa, synthetic construct
  REGION 1..246: note = Description of Artificial Sequence: Synthetic polypeptide
EVQLVESGGGLVQPGGSLRLSCAASGFTFSSYAMSWVRQAPGKGLEWVSAISGSGGSTYYADSVKGRFTISRDNSKNTLYLQMNSLRAEDTAVYYCAKVEGSGSLDYWGQGTLVTVSSGGGGSGGGGSGGGGSEIVMTQSPGTLSLSPGERATLSCRASQSVSSAYLAWYQQKPGQPPRLLISGASTRATGIPDRFGGSGSGTDFTLTISRLEPEDFAVYYCQHYGSSFNGSSLFTFGQGTRLEIK

SEQ ID NO: 1106 - DNA, 738 bp, synthetic construct
  misc_feature 1..738: note = Description of Artificial Sequence: Synthetic polynucleotide
  source 1..738: mol_type = other DNA
gaagtgcagctcgtggagtcaggaggcggcctggtccagccgggagggtcccttagactgtcatgcgccgcaagcggattcactttctcctcctatgccatgagctgggtccgccaagcccccggaaagggactggaatgggtgtccgccatctcggggtctggaggctcaacttactacgctgactccgtgaagggacggttcaccattagccgcgacaactccaagaacaccctctacctccaaatgaactccctgcgggccgaggataccgccgtctactactgcgccaaagtggaaggttcaggatcgctggactactggggacagggtactctcgtgaccgtgtcatcgggcggaggaggttccggcggtggcggctccggcggcggagggtcggagatcgtgatgacccagagccctggtactctgagcctttcgccgggagaaagggccaccctgtcctgccgcgcttcccaatccgtgtcctccgcgtacttggcgtggtaccagcagaagccgggacagccccctcggctgctgatcagcggggccagcacccgggcaaccggaatcccagacagattcgggggttccggcagcggcacagatttcaccctgactatttcgaggttggagcccgaggactttgcggtgtattactgtcagcactacgggtcgtcctttaatggctccagcctgttcacgttcggacaggggacccgcctggaaatcaag

SEQ ID NO: 1107 - protein, 118 aa, synthetic construct
  REGION 1..118: note = Description of Artificial Sequence: Synthetic polypeptide
EVQLVESGGGLVQPGGSLRLSCAASGFTFSSYAMSWVRQAPGKGLEWVSAISGSGGSTYYADSVKGRFTISRDNSKNTLYLQMNSLRAEDTAVYYCAKVEGSGSLDYWGQGTLVTVSS

SEQ ID NO: 1108 - protein, 113 aa, synthetic construct
  REGION 1..113: note = Description of Artificial Sequence: Synthetic polypeptide
EIVMTQSPGTLSLSPGERATLSCRASQSVSSAYLAWYQQKPGQPPRLLISGASTRATGIPDRFGGSGSGTDFTLTISRLEPEDFAVYYCQHYGSSFNGSSLFTFGQGTRLEIK

SEQ ID NO: 1109 - protein, 490 aa, synthetic construct
  REGION 1..490: note = Description of Artificial Sequence: Synthetic polypeptide
MALPVTALLLPLALLLHAARPEVQLVESGGGLVQPGGSLRLSCAASGFTFSSYAMSWVRQAPGKGLEWVSAISGSGGSTYYADSVKGRFTISRDNSKNTLYLQMNSLRAEDTAVYYCAKVEGSGSLDYWGQGTLVTVSSGGGGSGGGGSGGGGSEIVMTQSPGTLSLSPGERATLSCRASQSVSSAYLAWYQQKPGQPPRLLISGASTRATGIPDRFGGSGSGTDFTLTISRLEPEDFAVYYCQHYGSSFNGSSLFTFGQGTRLEIKTTTPAPRPPTPAPTIASQPLSLRPEACRPAAGGAVHTRGLDFACDIYIWAPLAGTCGVLLLSLVITLYCKRGRKKLLYIFKQPFMRPVQTTQEEDGCSCRFPEEEEGGCELRVKFSRSADAPAYKQGQNQLYNELNLGRREEYDVLDKRRGRDPEMGGKPRRKNPQEGLYNELQKDKMAEAYSEIGMKGERRRGKGHDGLYQGLSTATKDTYDALHMQALPPR

SEQ ID NO: 1110 - DNA, 1470 bp, synthetic construct
  misc_feature 1..1470: note = Description of Artificial Sequence: Synthetic polynucleotide
  source 1..1470: mol_type = other DNA
atggccctccctgtcaccgccctgctgcttccgctggctcttctgctccacgccgctcggcccgaagtgcagctcgtggagtcaggaggcggcctggtccagccgggagggtcccttagactgtcatgcgccgcaagcggattcactttctcctcctatgccatgagctgggtccgccaagcccccggaaagggactggaatgggtgtccgccatctcggggtctggaggctcaacttactacgctgactccgtgaagggacggttcaccattagccgcgacaactccaagaacaccctctacctccaaatgaactccctgcgggccgaggataccgccgtctactactgcgccaaagtggaaggttcaggatcgctggactactggggacagggtactctcgtgaccgtgtcatcgggcggaggaggttccggcggtggcggctccggcggcggagggtcggagatcgtgatgacccagagccctggtactctgagcctttcgccgggagaaagggccaccctgtcctgccgcgcttcccaatccgtgtcctccgcgtacttggcgtggtaccagcagaagccgggacagccccctcggctgctgatcagcggggccagcacccgggcaaccggaatcccagacagattcgggggttccggcagcggcacagatttcaccctgactatttcgaggttggagcccgaggactttgcggtgtattactgtcagcactacgggtcgtcctttaatggctccagcctgttcacgttcggacaggggacccgcctggaaatcaagaccactaccccagcaccgaggccacccaccccggctcctaccatcgcctcccagcctctgtccctgcgtccggaggcatgtagacccgcagctggtggggccgtgcatacccggggtcttgacttcgcctgcgatatctacatttgggcccctctggctggtacttgcggggtcctgctgctttcactcgtgatcactctttactgtaagcgcggtcggaagaagctgctgtacatctttaagcaacccttcatgaggcctgtgcagactactcaagaggaggacggctgttcatgccggttcccagaggaggaggaaggcggctgcgaactgcgcgtgaaattcagccgcagcgcagatgctccagcctacaagcaggggcagaaccagctctacaacgaactcaatcttggtcggagagaggagtacgacgtgctggacaagcggagaggacgggacccagaaatgggcgggaagccgcgcagaaagaatccccaagagggcctgtacaacgagctccaaaaggataagatggcagaagcctatagcgagattggtatgaaaggggaacgcagaagaggcaaaggccacgacggactgtaccagggactcagcaccgccaccaaggacacctatgacgctcttcacatgcaggccctgccgcctcgg

SEQ ID NO: 1111 - protein, 241 aa, synthetic construct
  REGION 1..241: note = Description of Artificial Sequence: Synthetic polypeptide
EVQLVETGGGLVQPGGSLRLSCAASGITFSRYPMSWVRQAPGKGLEWVSGISDSGVSTYYADSAKGRFTISRDNSKNTLFLQMSSLRDEDTAVYYCVTRAGSEASDIWGQGTMVTVSSGGGGSGGGGSGGGGSEIVLTQSPATLSLSPGERATLSCRASQSVSNSLAWYQQKPGQAPRLLIYDASSRATGIPDRFSGSGSGTDFTLTISRLEPEDFAIYYCQQFGTSSGLTFGGGTKLEIK

SEQ ID NO: 1112 - DNA, 723 bp, synthetic construct
  misc_feature 1..723: note = Description of Artificial Sequence: Synthetic polynucleotide
  source 1..723: mol_type = other DNA
gaagtgcaactggtggaaaccggtggcggcctggtgcagcctggaggatcattgaggctgtcatgcgcggccagcggtattaccttctcccggtaccccatgtcctgggtcagacaggccccggggaaagggcttgaatgggtgtccgggatctcggactccggtgtcagcacttactacgccgactccgccaagggacgcttcaccatttcccgggacaactcgaagaacaccctgttcctccaaatgagctccctccgggacgaggatactgcagtgtactactgcgtgacccgcgccgggtccgaggcgtctgacatttggggacagggcactatggtcaccgtgtcgtccggcggagggggctcgggaggcggtggcagcggaggaggagggtccgagatcgtgctgacccaatccccggccaccctctcgctgagccctggagaaagggcaaccttgtcctgtcgcgcgagccagtccgtgagcaactccctggcctggtaccagcagaagcccggacaggctccgagacttctgatctacgacgcttcgagccgggccactggaatccccgaccgcttttcggggtccggctcaggaaccgatttcaccctgacaatctcacggctggagccagaggatttcgccatctattactgccagcagttcggtacttcctccggcctgactttcggaggcggcacgaagctcgaaatcaag

SEQ ID NO: 1113 - protein, 118 aa, synthetic construct
  REGION 1..118: note = Description of Artificial Sequence: Synthetic polypeptide
EVQLVETGGGLVQPGGSLRLSCAASGITFSRYPMSWVRQAPGKGLEWVSGISDSGVSTYYADSAKGRFTISRDNSKNTLFLQMSSLRDEDTAVYYCVTRAGSEASDIWGQGTMVTVSS

SEQ ID NO: 1114 - protein, 108 aa, synthetic construct
  REGION 1..108: note = Description of Artificial Sequence: Synthetic polypeptide
EIVLTQSPATLSLSPGERATLSCRASQSVSNSLAWYQQKPGQAPRLLIYDASSRATGIPDRFSGSGSGTDFTLTISRLEPEDFAIYYCQQFGTSSGLTFGGGTKLEIK

SEQ ID NO: 1115 - protein, 485 aa, synthetic construct
  REGION 1..485: note = Description of Artificial Sequence: Synthetic polypeptide
MALPVTALLLPLALLLHAARPEVQLVETGGGLVQPGGSLRLSCAASGITFSRYPMSWVRQAPGKGLEWVSGISDSGVSTYYADSAKGRFTISRDNSKNTLFLQMSSLRDEDTAVYYCVTRAGSEASDIWGQGTMVTVSSGGGGSGGGGSGGGGSEIVLTQSPATLSLSPGERATLSCRASQSVSNSLAWYQQKPGQAPRLLIYDASSRATGIPDRFSGSGSGTDFTLTISRLEPEDFAIYYCQQFGTSSGLTFGGGTKLEIKTTTPAPRPPTPAPTIASQPLSLRPEACRPAAGGAVHTRGLDFACDIYIWAPLAGTCGVLLLSLVITLYCKRGRKKLLYIFKQPFMRPVQTTQEEDGCSCRFPEEEEGGCELRVKFSRSADAPAYKQGQNQLYNELNLGRREEYDVLDKRRGRDPEMGGKPRRKNPQEGLYNELQKDKMAEAYSEIGMKGERRRGKGHDGLYQGLSTATKDTYDALHMQALPPR

SEQ ID NO: 1116 - DNA, 1455 bp, synthetic construct
  misc_feature 1..1455: note = Description of Artificial Sequence: Synthetic polynucleotide
  source 1..1455: mol_type = other DNA
atggccctccctgtcaccgccctgctgcttccgctggctcttctgctccacgccgctcggcccgaagtgcaactggtggaaaccggtggcggcctggtgcagcctggaggatcattgaggctgtcatgcgcggccagcggtattaccttctcccggtaccccatgtcctgggtcagacaggccccggggaaagggcttgaatgggtgtccgggatctcggactccggtgtcagcacttactacgccgactccgccaagggacgcttcaccatttcccgggacaactcgaagaacaccctgttcctccaaatgagctccctccgggacgaggatactgcagtgtactactgcgtgacccgcgccgggtccgaggcgtctgacatttggggacagggcactatggtcaccgtgtcgtccggcggagggggctcgggaggcggtggcagcggaggaggagggtccgagatcgtgctgacccaatccccggccaccctctcgctgagccctggagaaagggcaaccttgtcctgtcgcgcgagccagtccgtgagcaactccctggcctggtaccagcagaagcccggacaggctccgagacttctgatctacgacgcttcgagccgggccactggaatccccgaccgcttttcggggtccggctcaggaaccgatttcaccctgacaatctcacggctggagccagaggatttcgccatctattactgccagcagttcggtacttcctccggcctgactttcggaggcggcacgaagctcgaaatcaagaccactaccccagcaccgaggccacccaccccggctcctaccatcgcctcccagcctctgtccctgcgtccggaggcatgtagacccgcagctggtggggccgtgcatacccggggtcttgacttcgcctgcgatatctacatttgggcccctctggctggtacttgcggggtcctgctgctttcactcgtgatcactctttactgtaagcgcggtcggaagaagctgctgtacatctttaagcaacccttcatgaggcctgtgcagactactcaagaggaggacggctgttcatgccggttcccagaggaggaggaaggcggctgcgaactgcgcgtgaaattcagccgcagcgcagatgctccagcctacaagcaggggcagaaccagctctacaacgaactcaatcttggtcggagagaggagtacgacgtgctggacaagcggagaggacgggacccagaaatgggcgggaagccgcgcagaaagaatccccaagagggcctgtacaacgagctccaaaaggataagatggcagaagcctatagcgagattggtatgaaaggggaacgcagaagaggcaaaggccacgacggactgtaccagggactcagcaccgccaccaaggacacctatgacgctcttcacatgcaggccctgccgcctcgg

SEQ ID NO: 1117 - protein, 248 aa, synthetic construct
  REGION 1..248: note = Description of Artificial Sequence: Synthetic polypeptide
QVQLVESGGGLVQPGGSLRLSCAASGFTFSSYAMSWVRQAPGKGLEWVSAISGSGGSTYYADSVKGRFTISRDNAKNSLYLQMNSLRAEDTAIYYCARATYKRELRYYYGMDVWGQGTMVTVSSGGGGSGGGGSGGGGSEIVMTQSPGTVSLSPGERATLSCRASQSVSSSFLAWYQQKPGQAPRLLIYGASSRATGIPDRFSGSGSGTDFTLTISRLEPEDSAVYYCQQYHSSPSWTFGQGTRLEIK

SEQ ID NO: 1118 - DNA, 744 bp, synthetic construct
  misc_feature 1..744: note = Description of Artificial Sequence: Synthetic polynucleotide
  source 1..744: mol_type = other DNA
caagtgcagctcgtggaatcgggtggcggactggtgcagccggggggctcacttagactgtcctgcgcggccagcggattcactttctcctcctacgccatgtcctgggtcagacaggcccctggaaagggcctggaatgggtgtccgcaatcagcggcagcggcggctcgacctattacgcggattcagtgaagggcagattcaccatttcccgggacaacgccaagaactccttgtaccttcaaatgaactccctccgcgcggaagataccgcaatctactactgcgctcgggccacttacaagagggaactgcgctactactacgggatggacgtctggggccagggaaccatggtcaccgtgtccagcggaggaggaggatcgggaggaggcggtagcgggggtggagggtcggagatcgtgatgacccagtcccccggcactgtgtcgctgtcccccggcgaacgggccaccctgtcatgtcgggccagccagtcagtgtcgtcaagcttcctcgcctggtaccagcagaaaccgggacaagctccccgcctgctgatctacggagccagcagccgggccaccggtattcctgaccggttctccggttcggggtccgggaccgactttactctgactatctctcgcctcgagccagaggactccgccgtgtattactgccagcagtaccactcctccccgtcctggacgttcggacagggcacaaggctggagattaag

SEQ ID NO: 1119 - protein, 124 aa, synthetic construct
  REGION 1..124: note = Description of Artificial Sequence: Synthetic polypeptide
QVQLVESGGGLVQPGGSLRLSCAASGFTFSSYAMSWVRQAPGKGLEWVSAISGSGGSTYYADSVKGRFTISRDNAKNSLYLQMNSLRAEDTAIYYCARATYKRELRYYYGMDVWGQGTMVTVSS

SEQ ID NO: 1120 - protein, 109 aa, synthetic construct
  REGION 1..109: note = Description of Artificial Sequence: Synthetic polypeptide
EIVMTQSPGTVSLSPGERATLSCRASQSVSSSFLAWYQQKPGQAPRLLIYGASSRATGIPDRFSGSGSGTDFTLTISRLEPEDSAVYYCQQYHSSPSWTFGQGTRLEIK

SEQ ID NO: 1121 - protein, 492 aa, synthetic construct
  REGION 1..492: note = Description of Artificial Sequence: Synthetic polypeptide
MALPVTALLLPLALLLHAARPQVQLVESGGGLVQPGGSLRLSCAASGFTFSSYAMSWVRQAPGKGLEWVSAISGSGGSTYYADSVKGRFTISRDNAKNSLYLQMNSLRAEDTAIYYCARATYKRELRYYYGMDVWGQGTMVTVSSGGGGSGGGGSGGGGSEIVMTQSPGTVSLSPGERATLSCRASQSVSSSFLAWYQQKPGQAPRLLIYGASSRATGIPDRFSGSGSGTDFTLTISRLEPEDSAVYYCQQYHSSPSWTFGQGTRLEIKTTTPAPRPPTPAPTIASQPLSLRPEACRPAAGGAVHTRGLDFACDIYIWAPLAGTCGVLLLSLVITLYCKRGRKKLLYIFKQPFMRPVQTTQEEDGCSCRFPEEEEGGCELRVKFSRSADAPAYKQGQNQLYNELNLGRREEYDVLDKRRGRDPEMGGKPRRKNPQEGLYNELQKDKMAEAYSEIGMKGERRRGKGHDGLYQGLSTATKDTYDALHMQALPPR

SEQ ID NO: 1122 - DNA, 1476 bp, synthetic construct
  misc_feature 1..1476: note = Description of Artificial Sequence: Synthetic polynucleotide
  source 1..1476: mol_type = other DNA
atggccctccctgtcaccgccctgctgcttccgctggctcttctgctccacgccgctcggccccaagtgcagctcgtggaatcgggtggcggactggtgcagccggggggctcacttagactgtcctgcgcggccagcggattcactttctcctcctacgccatgtcctgggtcagacaggcccctggaaagggcctggaatgggtgtccgcaatcagcggcagcggcggctcgacctattacgcggattcagtgaagggcagattcaccatttcccgggacaacgccaagaactccttgtaccttcaaatgaactccctccgcgcggaagataccgcaatctactactgcgctcgggccacttacaagagggaactgcgctactactacgggatggacgtctggggccagggaaccatggtcaccgtgtccagcggaggaggaggatcgggaggaggcggtagcgggggtggagggtcggagatcgtgatgacccagtcccccggcactgtgtcgctgtcccccggcgaacgggccaccctgtcatgtcgggccagccagtcagtgtcgtcaagcttcctcgcctggtaccagcagaaaccgggacaagctccccgcctgctgatctacggagccagcagccgggccaccggtattcctgaccggttctccggttcggggtccgggaccgactttactctgactatctctcgcctcgagccagaggactccgccgtgtattactgccagcagtaccactcctccccgtcctggacgttcggacagggcacaaggctggagattaagaccactaccccagcaccgaggccacccaccccggctcctaccatcgcctcccagcctctgtccctgcgtccggaggcatgtagacccgcagctggtggggccgtgcatacccggggtcttgacttcgcctgcgatatctacatttgggcccctctggctggtacttgcggggtcctgctgctttcactcgtgatcactctttactgtaagcgcggtcggaagaagctgctgtacatctttaagcaacccttcatgaggcctgtgcagactactcaagaggaggacggctgttcatgccggttcccagaggaggaggaaggcggctgcgaactgcgcgtgaaattcagccgcagcgcagatgctccagcctacaagcaggggcagaaccagctctacaacgaactcaatcttggtcggagagaggagtacgacgtgctggacaagcggagaggacgggacccagaaatgggcgggaagccgcgcagaaagaatccccaagagggcctgtacaacgagctccaaaaggataagatggcagaagcctatagcgagattggtatgaaaggggaacgcagaagaggcaaaggccacgacggactgtaccagggactcagcaccgccaccaaggacacctatgacgctcttcacatgcaggccctgccgcctcgg

SEQ ID NO: 1123 - protein, 248 aa, synthetic construct
  REGION 1..248: note = Description of Artificial Sequence: Synthetic polypeptide
EVQLVETGGGLVQPGGSLRLSCAASGFTFSSYAMSWVRQAPGKGLEWVSAISGSGGSTYYADSVKGRFTISRDNSKNTLYLQMNTLKAEDTAVYYCARATYKRELRYYYGMDVWGQGTTVTVSSGGGGSGGGGSGGGGSEIVLTQSPSTLSLSPGESATLSCRASQSVSTTFLAWYQQKPGQAPRLLIYGSSNRATGIPDRFSGSGSGTDFTLTIRRLEPEDFAVYYCQQYHSSPSWTFGQGTKVEIK

SEQ ID NO: 1124 - DNA, 744 bp, synthetic construct
  misc_feature 1..744: note = Description of Artificial Sequence: Synthetic polynucleotide
  source 1..744: mol_type = other DNA
gaggtgcagcttgtggaaaccggtggcggactggtgcagcccggaggaagcctcaggctgtcctgcgccgcgtccggcttcaccttctcctcgtacgccatgtcctgggtccgccaggcccccggaaagggcctggaatgggtgtccgccatctctggaagcggaggttccacgtactacgcggacagcgtcaagggaaggttcacaatctcccgcgataattcgaagaacactctgtaccttcaaatgaacaccctgaaggccgaggacactgctgtgtactactgcgcacgggccacctacaagagagagctccggtactactacggaatggacgtctggggccagggaactactgtgaccgtgtcctcgggagggggtggctccggggggggcggctccggcggaggcggttccgagattgtgctgacccagtcaccttcaactctgtcgctgtccccgggagagagcgctactctgagctgccgggccagccagtccgtgtccaccaccttcctcgcctggtatcagcagaagccggggcaggcaccacggctcttgatctacgggtcaagcaacagagcgaccggaattcctgaccgcttctcggggagcggttcaggcaccgacttcaccctgactatccggcgcctggaacccgaagatttcgccgtgtattactgtcaacagtaccactcctcgccgtcctggacctttggccaaggaaccaaagtggaaatcaag

SEQ ID NO: 1125 - protein, 124 aa, synthetic construct
  REGION 1..124: note = Description of Artificial Sequence: Synthetic polypeptide
EVQLVETGGGLVQPGGSLRLSCAASGFTFSSYAMSWVRQAPGKGLEWVSAISGSGGSTYYADSVKGRFTISRDNSKNTLYLQMNTLKAEDTAVYYCARATYKRELRYYYGMDVWGQGTTVTVSS

SEQ ID NO: 1126 - protein, 109 aa, synthetic construct
  REGION 1..109: note = Description of Artificial Sequence: Synthetic polypeptide
EIVLTQSPSTLSLSPGESATLSCRASQSVSTTFLAWYQQKPGQAPRLLIYGSSNRATGIPDRFSGSGSGTDFTLTIRRLEPEDFAVYYCQQYHSSPSWTFGQGTKVEIK

SEQ ID NO: 1127 - protein, 492 aa, synthetic construct
  REGION 1..492: note = Description of Artificial Sequence: Synthetic polypeptide
MALPVTALLLPLALLLHAARPEVQLVETGGGLVQPGGSLRLSCAASGFTFSSYAMSWVRQAPGKGLEWVSAISGSGGSTYYADSVKGRFTISRDNSKNTLYLQMNTLKAEDTAVYYCARATYKRELRYYYGMDVWGQGTTVTVSSGGGGSGGGGSGGGGSEIVLTQSPSTLSLSPGESATLSCRASQSVSTTFLAWYQQKPGQAPRLLIYGSSNRATGIPDRFSGSGSGTDFTLTIRRLEPEDFAVYYCQQYHSSPSWTFGQGTKVEIKTTTPAPRPPTPAPTIASQPLSLRPEACRPAAGGAVHTRGLDFACDIYIWAPLAGTCGVLLLSLVITLYCKRGRKKLLYIFKQPFMRPVQTTQEEDGCSCRFPEEEEGGCELRVKFSRSADAPAYKQGQNQLYNELNLGRREEYDVLDKRRGRDPEMGGKPRRKNPQEGLYNELQKDKMAEAYSEIGMKGERRRGKGHDGLYQGLSTATKDTYDALHMQALPPR

SEQ ID NO: 1128 - DNA, 1476 bp, synthetic construct
  misc_feature 1..1476: note = Description of Artificial Sequence: Synthetic polynucleotide
  source 1..1476: mol_type = other DNA
atggccctccctgtcaccgccctgctgcttccgctggctcttctgctccacgccgctcggcccgaggtgcagcttgtggaaaccggtggcggactggtgcagcccggaggaagcctcaggctgtcctgcgccgcgtccggcttcaccttctcctcgtacgccatgtcctgggtccgccaggcccccggaaagggcctggaatgggtgtccgccatctctggaagcggaggttccacgtactacgcggacagcgtcaagggaaggttcacaatctcccgcgataattcgaagaacactctgtaccttcaaatgaacaccctgaaggccgaggacactgctgtgtactactgcgcacgggccacctacaagagagagctccggtactactacggaatggacgtctggggccagggaactactgtgaccgtgtcctcgggagggggtggctccggggggggcggctccggcggaggcggttccgagattgtgctgacccagtcaccttcaactctgtcgctgtccccgggagagagcgctactctgagctgccgggccagccagtccgtgtccaccaccttcctcgcctggtatcagcagaagccggggcaggcaccacggctcttgatctacgggtcaagcaacagagcgaccggaattcctgaccgcttctcggggagcggttcaggcaccgacttcaccctgactatccggcgcctggaacccgaagatttcgccgtgtattactgtcaacagtaccactcctcgccgtcctggacctttggccaaggaaccaaagtggaaatcaagaccactaccccagcaccgaggccacccaccccggctcctaccatcgcctcccagcctctgtccctgcgtccggaggcatgtagacccgcagctggtggggccgtgcatacccggggtcttgacttcgcctgcgatatctacatttgggcccctctggctggtacttgcggggtcctgctgctttcactcgtgatcactctttactgtaagcgcggtcggaagaagctgctgtacatctttaagcaacccttcatgaggcctgtgcagactactcaagaggaggacggctgttcatgccggttcccagaggaggaggaaggcggctgcgaactgcgcgtgaaattcagccgcagcgcagatgctccagcctacaagcaggggcagaaccagctctacaacgaactcaatcttggtcggagagaggagtacgacgtgctggacaagcggagaggacgggacccagaaatgggcgggaagccgcgcagaaagaatccccaagagggcctgtacaacgagctccaaaaggataagatggcagaagcctatagcgagattggtatgaaaggggaacgcagaagaggcaaaggccacgacggactgtaccagggactcagcaccgccaccaaggacacctatgacgctcttcacatgcaggccctgccgcctcgg

SEQ ID NO: 1129 - protein, 239 aa, synthetic construct
  REGION 1..239: note = Description of Artificial Sequence: Synthetic polypeptide
EVQLVETGGGLVQPGRSLRLSCAASGFTFDDYAMHWVRQAPGKGLEWVSGISWNSGSIGYADSVKGRFTISRDNAKNSLYLQMNSLRDEDTAVYYCARVGKAVPDVWGQGTTVTVSSGGGGSGGGGSGGGGSDIVMTQTPSSLSASVGDRVTITCRASQSISSYLNWYQQKPGKAPKLLIYAASSLQSGVPSRFSGSGSGTDFTLTISSLQPEDFATYYCQQSYSTPYSFGQGTRLEIK

SEQ ID NO: 1130 - DNA, 717 bp, synthetic construct
  misc_feature 1..717: note = Description of Artificial Sequence: Synthetic polynucleotide
  source 1..717: mol_type = other DNA
gaagtgcagctcgtggaaactggaggtggactcgtgcagcctggacggtcgctgcggctgagctgcgctgcatccggcttcaccttcgacgattatgccatgcactgggtcagacaggcgccagggaagggacttgagtgggtgtccggtatcagctggaatagcggctcaatcggatacgcggactccgtgaagggaaggttcaccatttcccgcgacaacgccaagaactccctgtacttgcaaatgaacagcctccgggatgaggacactgccgtgtactactgcgcccgcgtcggaaaagctgtgcccgacgtctggggccagggaaccactgtgaccgtgtccagcggcgggggtggatcgggcggtggagggtccggtggagggggctcagatattgtgatgacccagaccccctcgtccctgtccgcctcggtcggcgaccgcgtgactatcacatgtagagcctcgcagagcatctccagctacctgaactggtatcagcagaagccggggaaggccccgaagctcctgatctacgcggcatcatcactgcaatcgggagtgccgagccggttttccgggtccggctccggcaccgacttcacgctgaccatttcttccctgcaacccgaggacttcgccacttactactgccagcagtcctactccaccccttactccttcggccaaggaaccaggctggaaatcaag

SEQ ID NO: 1131 - protein, 117 aa, synthetic construct
  REGION 1..117: note = Description of Artificial Sequence: Synthetic polypeptide
EVQLVETGGGLVQPGRSLRLSCAASGFTFDDYAMHWVRQAPGKGLEWVSGISWNSGSIGYADSVKGRFTISRDNAKNSLYLQMNSLRDEDTAVYYCARVGKAVPDVWGQGTTVTVSS

SEQ ID NO: 1132 - protein, 107 aa, synthetic construct
  REGION 1..107: note = Description of Artificial Sequence: Synthetic polypeptide
DIVMTQTPSSLSASVGDRVTITCRASQSISSYLNWYQQKPGKAPKLLIYAASSLQSGVPSRFSGSGSGTDFTLTISSLQPEDFATYYCQQSYSTPYSFGQGTRLEIK

SEQ ID NO: 1133 - protein, 483 aa, synthetic construct
  REGION 1..483: note = Description of Artificial Sequence: Synthetic polypeptide
MALPVTALLLPLALLLHAARPEVQLVETGGGLVQPGRSLRLSCAASGFTFDDYAMHWVRQAPGKGLEWVSGISWNSGSIGYADSVKGRFTISRDNAKNSLYLQMNSLRDEDTAVYYCARVGKAVPDVWGQGTTVTVSSGGGGSGGGGSGGGGSDIVMTQTPSSLSASVGDRVTITCRASQSISSYLNWYQQKPGKAPKLLIYAASSLQSGVPSRFSGSGSGTDFTLTISSLQPEDFATYYCQQSYSTPYSFGQGTRLEIKTTTPAPRPPTPAPTIASQPLSLRPEACRPAAGGAVHTRGLDFACDIYIWAPLAGTCGVLLLSLVITLYCKRGRKKLLYIFKQPFMRPVQTTQEEDGCSCRFPEEEEGGCELRVKFSRSADAPAYKQGQNQLYNELNLGRREEYDVLDKRRGRDPEMGGKPRRKNPQEGLYNELQKDKMAEAYSEIGMKGERRRGKGHDGLYQGLSTATKDTYDALHMQALPPR

SEQ ID NO: 1134 - DNA, 1449 bp, synthetic construct
  misc_feature 1..1449: note = Description of Artificial Sequence: Synthetic polynucleotide
  source 1..1449: mol_type = other DNA
atggccctccctgtcaccgccctgctgcttccgctggctcttctgctccacgccgctcggcccgaagtgcagctcgtggaaactggaggtggactcgtgcagcctggacggtcgctgcggctgagctgcgctgcatccggcttcaccttcgacgattatgccatgcactgggtcagacaggcgccagggaagggacttgagtgggtgtccggtatcagctggaatagcggctcaatcggatacgcggactccgtgaagggaaggttcaccatttcccgcgacaacgccaagaactccctgtacttgcaaatgaacagcctccgggatgaggacactgccgtgtactactgcgcccgcgtcggaaaagctgtgcccgacgtctggggccagggaaccactgtgaccgtgtccagcggcgggggtggatcgggcggtggagggtccggtggagggggctcagatattgtgatgacccagaccccctcgtccctgtccgcctcggtcggcgaccgcgtgactatcacatgtagagcctcgcagagcatctccagctacctgaactggtatcagcagaagccggggaaggccccgaagctcctgatctacgcggcatcatcactgcaatcgggagtgccgagccggttttccgggtccggctccggcaccgacttcacgctgaccatttcttccctgcaacccgaggacttcgccacttactactgccagcagtcctactccaccccttactccttcggccaaggaaccaggctggaaatcaagaccactaccccagcaccgaggccacccaccccggctcctaccatcgcctcccagcctctgtccctgcgtccggaggcatgtagacccgcagctggtggggccgtgcatacccggggtcttgacttcgcctgcgatatctacatttgggcccctctggctggtacttgcggggtcctgctgctttcactcgtgatcactctttactgtaagcgcggtcggaagaagctgctgtacatctttaagcaacccttcatgaggcctgtgcagactactcaagaggaggacggctgttcatgccggttcccagaggaggaggaaggcggctgcgaactgcgcgtgaaattcagccgcagcgcagatgctccagcctacaagcaggggcagaaccagctctacaacgaactcaatcttggtcggagagaggagtacgacgtgctggacaagcggagaggacgggacccagaaatgggcgggaagccgcgcagaaagaatccccaagagggcctgtacaacgagctccaaaaggataagatggcagaagcctatagcgagattggtatgaaaggggaacgcagaagaggcaaaggccacgacggactgtaccagggactcagcaccgccaccaaggacacctatgacgctcttcacatgcaggccctgccgcctcgg

SEQ ID NO: 1135 - protein, 246 aa, synthetic construct
  REGION 1..246: note = Description of Artificial Sequence: Synthetic polypeptide
EVQLVESGGGLVQPGRSLRLSCTASGFTFDDYAMHWVRQRPGKGLEWVASINWKGNSLAYGDSVKGRFAISRDNAKNTVFLQMNSLRTEDTAVYYCASHQGVAYYNYAMDVWGRGTLVTVSSGGGGSGGGGSGGGGSEIVLTQSPGTLSLSPGERATLSCRATQSIGSSFLAWYQQRPGQAPRLLIYGASQRATGIPDRFSGRGSGTDFTLTISRVEPEDSAVYYCQHYESSPSWTFGQGTKVEIK

SEQ ID NO: 1136 - DNA, 738 bp, synthetic construct
  misc_feature 1..738: note = Description of Artificial Sequence: Synthetic polynucleotide
  source 1..738: mol_type = other DNA
gaagtgcagctcgtggagagcgggggaggattggtgcagcccggaaggtccctgcggctctcctgcactgcgtctggcttcaccttcgacgactacgcgatgcactgggtcagacagcgcccgggaaagggcctggaatgggtcgcctcaatcaactggaagggaaactccctggcctatggcgacagcgtgaagggccgcttcgccatttcgcgcgacaacgccaagaacaccgtgtttctgcaaatgaattccctgcggaccgaggataccgctgtgtactactgcgccagccaccagggcgtggcatactataactacgccatggacgtgtggggaagagggacgctcgtcaccgtgtcctccgggggcggtggatcgggtggaggaggaagcggtggcgggggcagcgaaatcgtgctgactcagagcccgggaactctttcactgtccccgggagaacgggccactctctcgtgccgggccacccagtccatcggctcctccttccttgcctggtaccagcagaggccaggacaggcgccccgcctgctgatctacggtgcttcccaacgcgccactggcattcctgaccggttcagcggcagagggtcgggaaccgatttcacactgaccatttcccgggtggagcccgaagattcggcagtctactactgtcagcattacgagtcctccccttcatggaccttcggtcaagggaccaaagtggagatcaag

SEQ ID NO: 1137 - protein, 122 aa, synthetic construct
  REGION 1..122: note = Description of Artificial Sequence: Synthetic polypeptide
EVQLVESGGGLVQPGRSLRLSCTASGFTFDDYAMHWVRQRPGKGLEWVASINWKGNSLAYGDSVKGRFAISRDNAKNTVFLQMNSLRTEDTAVYYCASHQGVAYYNYAMDVWGRGTLVTVSS

SEQ ID NO: 1138 - protein, 109 aa, synthetic construct
  REGION 1..109: note = Description of Artificial Sequence: Synthetic polypeptide
EIVLTQSPGTLSLSPGERATLSCRATQSIGSSFLAWYQQRPGQAPRLLIYGASQRATGIPDRFSGRGSGTDFTLTISRVEPEDSAVYYCQHYESSPSWTFGQGTKVEIK

SEQ ID NO: 1139 - protein, 490 aa, synthetic construct
  REGION 1..490: note = Description of Artificial Sequence: Synthetic polypeptide
MALPVTALLLPLALLLHAARPEVQLVESGGGLVQPGRSLRLSCTASGFTFDDYAMHWVRQRPGKGLEWVASINWKGNSLAYGDSVKGRFAISRDNAKNTVFLQMNSLRTEDTAVYYCASHQGVAYYNYAMDVWGRGTLVTVSSGGGGSGGGGSGGGGSEIVLTQSPGTLSLSPGERATLSCRATQSIGSSFLAWYQQRPGQAPRLLIYGASQRATGIPDRFSGRGSGTDFTLTISRVEPEDSAVYYCQHYESSPSWTFGQGTKVEIKTTTPAPRPPTPAPTIASQPLSLRPEACRPAAGGAVHTRGLDFACDIYIWAPLAGTCGVLLLSLVITLYCKRGRKKLLYIFKQPFMRPVQTTQEEDGCSCRFPEEEEGGCELRVKFSRSADAPAYKQGQNQLYNELNLGRREEYDVLDKRRGRDPEMGGKPRRKNPQEGLYNELQKDKMAEAYSEIGMKGERRRGKGHDGLYQGLSTATKDTYDALHMQALPPR

SEQ ID NO: 1140 - DNA, 1470 bp, synthetic construct
  misc_feature 1..1470: note = Description of Artificial Sequence: Synthetic polynucleotide
  source 1..1470: mol_type = other DNA
atggccctccctgtcaccgccctgctgcttccgctggctcttctgctccacgccgctcggcccgaagtgcagctcgtggagagcgggggaggattggtgcagcccggaaggtccctgcggctctcctgcactgcgtctggcttcaccttcgacgactacgcgatgcactgggtcagacagcgcccgggaaagggcctggaatgggtcgcctcaatcaactggaagggaaactccctggcctatggcgacagcgtgaagggccgcttcgccatttcgcgcgacaacgccaagaacaccgtgtttctgcaaatgaattccctgcggaccgaggataccgctgtgtactactgcgccagccaccagggcgtggcatactataactacgccatggacgtgtggggaagagggacgctcgtcaccgtgtcctccgggggcggtggatcgggtggaggaggaagcggtggcgggggcagcgaaatcgtgctgactcagagcccgggaactctttcactgtccccgggagaacgggccactctctcgtgccgggccacccagtccatcggctcctccttccttgcctggtaccagcagaggccaggacaggcgccccgcctgctgatctacggtgcttcccaacgcgccactggcattcctgaccggttcagcggcagagggtcgggaaccgatttcacactgaccatttcccgggtggagcccgaagattcggcagtctactactgtcagcattacgagtcctccccttcatggaccttcggtcaagggaccaaagtggagatcaagaccactaccccagcaccgaggccacccaccccggctcctaccatcgcctcccagcctctgtccctgcgtccggaggcatgtagacccgcagctggtggggccgtgcatacccggggtcttgacttcgcctgcgatatctacatttgggcccctctggctggtacttgcggggtcctgctgctttcactcgtgatcactctttactgtaagcgcggtcggaagaagctgctgtacatctttaagcaacccttcatgaggcctgtgcagactactcaagaggaggacggctgttcatgccggttcccagaggaggaggaaggcggctgcgaactgcgcgtgaaattcagccgcagcgcagatgctccagcctacaagcaggggcagaaccagctctacaacgaactcaatcttggtcggagagaggagtacgacgtgctggacaagcggagaggacgggacccagaaatgggcgggaagccgcgcagaaagaatccccaagagggcctgtacaacgagctccaaaaggataagatggcagaagcctatagcgagattggtatgaaaggggaacgcagaagaggcaaaggccacgacggactgtaccagggactcagcaccgccaccaaggacacctatgacgctcttcacatgcaggccctgccgcctcgg

SEQ ID NO: 1141 - protein, 241 aa, synthetic construct
  REGION 1..241: note = Description of Artificial Sequence: Synthetic polypeptide
EVQLVESGGGLVQPGGSLRLSCAASGFTFSSYAMSWVRQAPGKGLEWVSAISGSGGSTYYADSVKGRFTISRDNSKNTLYLQMNSLRAEDTAVYYCAKVVRDGMDVWGQGTTVTVSSGGGGSGGGGSGGGGSEIVLTQSPATLSLSPGERATLSCRASQSVSSSYLAWYQQKPGQAPRLLIYGASSRATGIPDRFSGNGSGTDFTLTISRLEPEDFAVYYCQQYGSPPRFTFGPGTKVDIK

SEQ ID NO: 1142 - DNA, 723 bp, synthetic construct
  misc_feature 1..723: note = Description of Artificial Sequence: Synthetic polynucleotide
  source 1..723: mol_type = other DNA
gaggtgcagttggtcgaaagcgggggcgggcttgtgcagcctggcggatcactgcggctgtcctgcgcggcatcaggcttcacgttttcttcctacgccatgtcctgggtgcgccaggcccctggaaagggactggaatgggtgtccgcgatttcggggtccggcgggagcacctactacgccgattccgtgaagggccgcttcactatctcgcgggacaactccaagaacaccctctacctccaaatgaatagcctgcgggccgaggataccgccgtctactattgcgctaaggtcgtgcgcgacggaatggacgtgtggggacagggtaccaccgtgacagtgtcctcggggggaggcggtagcggcggaggaggaagcggtggtggaggttccgagattgtgctgactcaatcacccgcgaccctgagcctgtcccccggcgaaagggccactctgtcctgtcgggccagccaatcagtctcctcctcgtacctggcctggtaccagcagaagccaggacaggctccgagactccttatctatggcgcatcctcccgcgccaccggaatcccggataggttctcgggaaacggatcggggaccgacttcactctcaccatctcccggctggaaccggaggacttcgccgtgtactactgccagcagtacggcagcccgcctagattcactttcggccccggcaccaaagtggacatcaag

SEQ ID NO: 1143 - protein, 117 aa, synthetic construct
  REGION 1..117: note = Description of Artificial Sequence: Synthetic polypeptide
EVQLVESGGGLVQPGGSLRLSCAASGFTFSSYAMSWVRQAPGKGLEWVSAISGSGGSTYYADSVKGRFTISRDNSKNTLYLQMNSLRAEDTAVYYCAKVVRDGMDVWGQGTTVTVSS

SEQ ID NO: 1144 - protein, 109 aa, synthetic construct
  REGION 1..109: note = Description of Artificial Sequence: Synthetic polypeptide
EIVLTQSPATLSLSPGERATLSCRASQSVSSSYLAWYQQKPGQAPRLLIYGASSRATGIPDRFSGNGSGTDFTLTISRLEPEDFAVYYCQQYGSPPRFTFGPGTKVDIK

SEQ ID NO: 1145 - protein, 485 aa, synthetic construct
  REGION 1..485: note = Description of Artificial Sequence: Synthetic polypeptide
MALPVTALLLPLALLLHAARPEVQLVESGGGLVQPGGSLRLSCAASGFTFSSYAMSWVRQAPGKGLEWVSAISGSGGSTYYADSVKGRFTISRDNSKNTLYLQMNSLRAEDTAVYYCAKVVRDGMDVWGQGTTVTVSSGGGGSGGGGSGGGGSEIVLTQSPATLSLSPGERATLSCRASQSVSSSYLAWYQQKPGQAPRLLIYGASSRATGIPDRFSGNGSGTDFTLTISRLEPEDFAVYYCQQYGSPPRFTFGPGTKVDIKTTTPAPRPPTPAPTIASQPLSLRPEACRPAAGGAVHTRGLDFACDIYIWAPLAGTCGVLLLSLVITLYCKRGRKKLLYIFKQPFMRPVQTTQEEDGCSCRFPEEEEGGCELRVKFSRSADAPAYKQGQNQLYNELNLGRREEYDVLDKRRGRDPEMGGKPRRKNPQEGLYNELQKDKMAEAYSEIGMKGERRRGKGHDGLYQGLSTATKDTYDALHMQALPPR

SEQ ID NO: 1146 - DNA, 1455 bp, synthetic construct
  misc_feature 1..1455: note = Description of Artificial Sequence: Synthetic polynucleotide
  source 1..1455: mol_type = other DNA
atggccctccctgtcaccgccctgctgcttccgctggctcttctgctccacgccgctcggcccgaggtgcagttggtcgaaagcgggggcgggcttgtgcagcctggcggatcactgcggctgtcctgcgcggcatcaggcttcacgttttcttcctacgccatgtcctgggtgcgccaggcccctggaaagggactggaatgggtgtccgcgatttcggggtccggcgggagcacctactacgccgattccgtgaagggccgcttcactatctcgcgggacaactccaagaacaccctctacctccaaatgaatagcctgcgggccgaggataccgccgtctactattgcgctaaggtcgtgcgcgacggaatggacgtgtggggacagggtaccaccgtgacagtgtcctcggggggaggcggtagcggcggaggaggaagcggtggtggaggttccgagattgtgctgactcaatcacccgcgaccctgagcctgtcccccggcgaaagggccactctgtcctgtcgggccagccaatcagtctcctcctcgtacctggcctggtaccagcagaagccaggacaggctccgagactccttatctatggcgcatcctcccgcgccaccggaatcccggataggttctcgggaaacggatcggggaccgacttcactctcaccatctcccggctggaaccggaggacttcgccgtgtactactgccagcagtacggcagcccgcctagattcactttcggccccggcaccaaagtggacatcaagaccactaccccagcaccgaggccacccaccccggctcctaccatcgcctcccagcctctgtccctgcgtccggaggcatgtagacccgcagctggtggggccgtgcatacccggggtcttgacttcgcctgcgatatctacatttgggcccctctggctggtacttgcggggtcctgctgctttcactcgtgatcactctttactgtaagcgcggtcggaagaagctgctgtacatctttaagcaacccttcatgaggcctgtgcagactactcaagaggaggacggctgttcatgccggttcccagaggaggaggaaggcggctgcgaactgcgcgtgaaattcagccgcagcgcagatgctccagcctacaagcaggggcagaaccagctctacaacgaactcaatcttggtcggagagaggagtacgacgtgctggacaagcggagaggacgggacccagaaatgggcgggaagccgcgcagaaagaatccccaagagggcctgtacaacgagctccaaaaggataagatggcagaagcctatagcgagattggtatgaaaggggaacgcagaagaggcaaaggccacgacggactgtaccagggactcagcaccgccaccaaggacacctatgacgctcttcacatgcaggccctgccgcctcgg

SEQ ID NO: 1147 - protein, 242 aa, synthetic construct
  REGION 1..242: note = Description of Artificial Sequence: Synthetic polypeptide
EVQLLESGGGLVQPGGSLRLSCAASGFTFSSYAMSWVRQAPGKGLEWVSAISGSGGSTYYADSVKGRFTISRDNSKNTLYLQMNSLRAEDTAVYYCAKIPQTGTFDYWGQGTLVTVSSGGGGSGGGGSGGGGSEIVLTQSPGTLSLSPGERATLSCRASQSVSSSYLAWYQQRPGQAPRLLIYGASSRATGIPDRFSGSGSGTDFTLTISRLEPEDFAVYYCQHYGSSPSWTFGQGTRLEIK

SEQ ID NO: 1148 - DNA, 726 bp, synthetic construct
  misc_feature 1..726: note = Description of Artificial Sequence: Synthetic polynucleotide
  source 1..726: mol_type = other DNA
gaagtgcagctgctggagtccggcggtggattggtgcaaccggggggatcgctcagactgtcctgtgcggcgtcaggcttcaccttctcgagctacgccatgtcatgggtcagacaggcccctggaaagggtctggaatgggtgtccgccatttccgggagcgggggatctacatactacgccgatagcgtgaagggccgcttcaccatttcccgggacaactccaagaacactctctatctgcaaatgaactccctccgcgctgaggacactgccgtgtactactgcgccaaaatccctcagaccggcaccttcgactactggggacaggggactctggtcaccgtcagcagcggtggcggaggttcggggggaggaggaagcggcggcggagggtccgagattgtgctgacccagtcacccggcactttgtccctgtcgcctggagaaagggccaccctttcctgccgggcatcccaatccgtgtcctcctcgtacctggcctggtaccagcagaggcccggacaggccccacggcttctgatctacggagcaagcagccgcgcgaccggtatcccggaccggttttcgggctcgggctcaggaactgacttcaccctcaccatctcccgcctggaacccgaagatttcgctgtgtattactgccagcactacggcagctccccgtcctggacgttcggccagggaactcggctggagatcaag

SEQ ID NO: 1149 - protein, 118 aa, synthetic construct
  REGION 1..118: note = Description of Artificial Sequence: Synthetic polypeptide
EVQLLESGGGLVQPGGSLRLSCAASGFTFSSYAMSWVRQAPGKGLEWVSAISGSGGSTYYADSVKGRFTISRDNSKNTLYLQMNSLRAEDTAVYYCAKIPQTGTFDYWGQGTLVTVSS

SEQ ID NO: 1150 - protein, 109 aa, synthetic construct
  REGION 1..109: note = Description of Artificial Sequence: Synthetic polypeptide
EIVLTQSPGTLSLSPGERATLSCRASQSVSSSYLAWYQQRPGQAPRLLIYGASSRATGIPDRFSGSGSGTDFTLTISRLEPEDFAVYYCQHYGSSPSWTFGQGTRLEIK

SEQ ID NO: 1151 - protein, 486 aa, synthetic construct
  REGION 1..486: note = Description of Artificial Sequence: Synthetic polypeptide
MALPVTALLLPLALLLHAARPEVQLLESGGGLVQPGGSLRLSCAASGFTFSSYAMSWVRQAPGKGLEWVSAISGSGGSTYYADSVKGRFTISRDNSKNTLYLQMNSLRAEDTAVYYCAKIPQTGTFDYWGQGTLVTVSSGGGGSGGGGSGGGGSEIVLTQSPGTLSLSPGERATLSCRASQSVSSSYLAWYQQRPGQAPRLLIYGASSRATGIPDRFSGSGSGTDFTLTISRLEPEDFAVYYCQHYGSSPSWTFGQGTRLEIKTTTPAPRPPTPAPTIASQPLSLRPEACRPAAGGAVHTRGLDFACDIYIWAPLAGTCGVLLLSLVITLYCKRGRKKLLYIFKQPFMRPVQTTQEEDGCSCRFPEEEEGGCELRVKFSRSADAPAYKQGQNQLYNELNLGRREEYDVLDKRRGRDPEMGGKPRRKNPQEGLYNELQKDKMAEAYSEIGMKGERRRGKGHDGLYQGLSTATKDTYDALHMQALPPR

SEQ ID NO: 1152 - DNA, 1458 bp, synthetic construct
  misc_feature 1..1458: note = Description of Artificial Sequence: Synthetic polynucleotide
  source 1..1458: mol_type = other DNA
atggccctccctgtcaccgccctgctgcttccgctggctcttctgctccacgccgctcggcccgaagtgcagctgctggagtccggcggtggattggtgcaaccggggggatcgctcagactgtcctgtgcggcgtcaggcttcaccttctcgagctacgccatgtcatgggtcagacaggcccctggaaagggtctggaatgggtgtccgccatttccgggagcgggggatctacatactacgccgatagcgtgaagggccgcttcaccatttcccgggacaactccaagaacactctctatctgcaaatgaactccctccgcgctgaggacactgccgtgtactactgcgccaaaatccctcagaccggcaccttcgactactggggacaggggactctggtcaccgtcagcagcggtggcggaggttcggggggaggaggaagcggcggcggagggtccgagattgtgctgacccagtcacccggcactttgtccctgtcgcctggagaaagggccaccctttcctgccgggcatcccaatccgtgtcctcctcgtacctggcctggtaccagcagaggcccggacaggccccacggcttctgatctacggagcaagcagccgcgcgaccggtatcccggaccggttttcgggctcgggctcaggaactgacttcaccctcaccatctcccgcctggaacccgaagatttcgctgtgtattactgccagcactacggcagctccccgtcctggacgttcggccagggaactcggctggagatcaagaccactaccccagcaccgaggccacccaccccggctcctaccatcgcctcccagcctctgtccctgcgtccggaggcatgtagacccgcagctggtggggccgtgcatacccggggtcttgacttcgcctgcgatatctacatttgggcccctctggctggtacttgcggggtcctgctgctttcactcgtgatcactctttactgtaagcgcggtcggaagaagctgctgtacatctttaagcaacccttcatgaggcctgtgcagactactcaagaggaggacggctgttcatgccggttcccagaggaggaggaaggcggctgcgaactgcgcgtgaaattcagccgcagcgcagatgctccagcctacaagcaggggcagaaccagctctacaacgaactcaatcttggtcggagagaggagtacgacgtgctggacaagcggagaggacgggacccagaaatgggcgggaagccgcgcagaaagaatccccaagagggcctgtacaacgagctccaaaaggataagatggcagaagcctatagcgagattggtatgaaaggggaacgcagaagaggcaaaggccacgacggactgtaccagggactcagcaccgccaccaaggacacctatgacgctcttcacatgcaggccctgccgcctcgg

SEQ ID NO: 1153 - protein, 248 aa, synthetic construct
  REGION 1..248: note = Description of Artificial Sequence: Synthetic polypeptide
EVQLVETGGGLVQPGGSLRLSCAASGFTFSSYAMSWVRQAPGKGLEWVSAISGSGGSTYYADSVKGRFTMSRENDKNSVFLQMNSLRVEDTGVYYCARANYKRELRYYYGMDVWGQGTMVTVSSGGGGSGGGGSGGGGSEIVMTQSPGTLSLSPGESATLSCRASQRVASNYLAWYQHKPGQAPSLLISGASSRATGVPDRFSGSGSGTDFTLAISRLEPEDSAVYYCQHYDSSPSWTFGQGTKVEIK

SEQ ID NO: 1154 - DNA, 744 bp, synthetic construct
  misc_feature 1..744: note = Description of Artificial Sequence: Synthetic polynucleotide
  source 1..744: mol_type = other DNA
gaagtgcaactggtggaaaccggtggaggactcgtgcagcctggcggcagcctccggctgagctgcgccgcttcgggattcaccttttcctcctacgcgatgtcttgggtcagacaggcccccggaaaggggctggaatgggtgtcagccatctccggctccggcggatcaacgtactacgccgactccgtgaaaggccggttcaccatgtcgcgcgagaatgacaagaactccgtgttcctgcaaatgaactccctgagggtggaggacaccggagtgtactattgtgcgcgcgccaactacaagagagagctgcggtactactacggaatggacgtctggggacagggaactatggtgaccgtgtcatccggtggagggggaagcggcggtggaggcagcgggggcgggggttcagaaattgtcatgacccagtccccgggaactctttccctctcccccggggaatccgcgactttgtcctgccgggccagccagcgcgtggcctcgaactacctcgcatggtaccagcataagccaggccaagccccttccctgctgatttccggggctagcagccgcgccactggcgtgccggataggttctcgggaagcggctcgggtaccgatttcaccctggcaatctcgcggctggaaccggaggattcggccgtgtactactgccagcactatgactcatccccctcctggacattcggacagggcaccaaggtcgagatcaag

SEQ ID NO: 1155 - protein, 124 aa, synthetic construct
  REGION 1..124: note = Description of Artificial Sequence: Synthetic polypeptide
EVQLVETGGGLVQPGGSLRLSCAASGFTFSSYAMSWVRQAPGKGLEWVSAISGSGGSTYYADSVKGRFTMSRENDKNSVFLQMNSLRVEDTGVYYCARANYKRELRYYYGMDVWGQGTMVTVSS

SEQ ID NO: 1156 - protein, 109 aa, synthetic construct
  REGION 1..109: note = Description of Artificial Sequence: Synthetic polypeptide
EIVMTQSPGTLSLSPGESATLSCRASQRVASNYLAWYQHKPGQAPSLLISGASSRATGVPDRFSGSGSGTDFTLAISRLEPEDSAVYYCQHYDSSPSWTFGQGTKVEIK

SEQ ID NO: 1157 - protein, 492 aa, synthetic construct
  REGION 1..492: note = Description of Artificial Sequence: Synthetic polypeptide
MALPVTALLLPLALLLHAARPEVQLVETGGGLVQPGGSLRLSCAASGFTFSSYAMSWVRQAPGKGLEWVSAISGSGGSTYYADSVKGRFTMSRENDKNSVFLQMNSLRVEDTGVYYCARANYKRELRYYYGMDVWGQGTMVTVSSGGGGSGGGGSGGGGSEIVMTQSPGTLSLSPGESATLSCRASQRVASNYLAWYQHKPGQAPSLLISGASSRATGVPDRFSGSGSGTDFTLAISRLEPEDSAVYYCQHYDSSPSWTFGQGTKVEIKTTTPAPRPPTPAPTIASQPLSLRPEACRPAAGGAVHTRGLDFACDIYIWAPLAGTCGVLLLSLVITLYCKRGRKKLLYIFKQPFMRPVQTTQEEDGCSCRFPEEEEGGCELRVKFSRSADAPAYKQGQNQLYNELNLGRREEYDVLDKRRGRDPEMGGKPRRKNPQEGLYNELQKDKMAEAYSEIGMKGERRRGKGHDGLYQGLSTATKDTYDALHMQALPPR

SEQ ID NO: 1158 - DNA, 1476 bp, synthetic construct
  misc_feature 1..1476: note = Description of Artificial Sequence: Synthetic polynucleotide
  source 1..1476: mol_type = other DNA
atggccctccctgtcaccgccctgctgcttccgctggctcttctgctccacgccgctcggcccgaagtgcaactggtggaaaccggtggaggactcgtgcagcctggcggcagcctccggctgagctgcgccgcttcgggattcaccttttcctcctacgcgatgtcttgggtcagacaggcccccggaaaggggctggaatgggtgtcagccatctccggctccggcggatcaacgtactacgccgactccgtgaaaggccggttcaccatgtcgcgcgagaatgacaagaactccgtgttcctgcaaatgaactccctgagggtggaggacaccggagtgtactattgtgcgcgcgccaactacaagagagagctgcggtactactacggaatggacgtctggggacagggaactatggtgaccgtgtcatccggtggagggggaagcggcggtggaggcagcgggggcgggggttcagaaattgtcatgacccagtccccgggaactctttccctctcccccggggaatccgcgactttgtcctgccgggccagccagcgcgtggcctcgaactacctcgcatggtaccagcataagccaggccaagccccttccctgctgatttccggggctagcagccgcgccactggcgtgccggataggttctcgggaagcggctcgggtaccgatttcaccctggcaatctcgcggctggaaccggaggattcggccgtgtactactgccagcactatgactcatccccctcctggacattcggacagggcaccaaggtcgagatcaagaccactaccccagcaccgaggccacccaccccggctcctaccatcgcctcccagcctctgtccctgcgtccggaggcatgtagacccgcagctggtggggccgtgcatacccggggtcttgacttcgcctgcgatatctacatttgggcccctctggctggtacttgcggggtcctgctgctttcactcgtgatcactctttactgtaagcgcggtcggaagaagctgctgtacatctttaagcaacccttcatgaggcctgtgcagactactcaagaggaggacggctgttcatgccggttcccagaggaggaggaaggcggctgcgaactgcgcgtgaaattcagccgcagcgcagatgctccagcctacaagcaggggcagaaccagctctacaacgaactcaatcttggtcggagagaggagtacgacgtgctggacaagcggagaggacgggacccagaaatgggcgggaagccgcgcagaaagaatccccaagagggcctgtacaacgagctccaaaaggataagatggcagaagcctatagcgagattggtatgaaaggggaacgcagaagaggcaaaggccacgacggactgtaccagggactcagcaccgccaccaaggacacctatgacgctcttcacatgcaggccctgccgcctcgg

SEQ ID NO: 1159 - protein, 244 aa, synthetic construct
  REGION 1..244: note = Description of Artificial Sequence: Synthetic polypeptide
EVQLLETGGGLVQPGGSLRLSCAASGFSFSSYAMSWVRQAPGKGLEWVSAISGSGGSTYYADSVKGRFTISRDNSKNTLYLQMNSLRAEDTAVYYCAKALVGATGAFDIWGQGTLVTVSSGGGGSGGGGSGGGGSEIVLTQSPGTLSLSPGERATLSCRASQSLSSNFLAWYQQKPGQAPGLLIYGASNWATGTPDRFSGSGSGTDFTLTITRLEPEDFAVYYCQYYGTSPMYTFGQGTKVEIK

SEQ ID NO: 1160 - DNA, 732 bp, synthetic construct
  misc_feature 1..732: note = Description of Artificial Sequence: Synthetic polynucleotide
  source 1..732: mol_type = other DNA
gaagtgcagctgctcgaaaccggtggagggctggtgcagccagggggctccctgaggctttcatgcgccgctagcggattctccttctcctcttacgccatgtcgtgggtccgccaagcccctggaaaaggcctggaatgggtgtccgcgatttccgggagcggaggttcgacctattacgccgactccgtgaagggccgctttaccatctcccgggataactccaagaacactctgtacctccaaatgaactcgctgagagccgaggacaccgccgtgtattactgcgcgaaggcgctggtcggcgcgactggggcattcgacatctggggacagggaactcttgtgaccgtgtcgagcggaggcggcggctccggcggaggagggagcgggggcggtggttccgaaatcgtgttgactcagtccccgggaaccctgagcttgtcacccggggagcgggccactctctcctgtcgcgcctcccaatcgctctcatccaatttcctggcctggtaccagcagaagcccggacaggccccgggcctgctcatctacggcgcttcaaactgggcaacgggaacccctgatcggttcagcggaagcggatcgggtactgactttaccctgaccatcaccagactggaaccggaggacttcgccgtgtactactgccagtactacggcacctcccccatgtacacattcggacagggtaccaaggtcgagattaag

SEQ ID NO: 1161 - protein, 120 aa, synthetic construct
  REGION 1..120: note = Description of Artificial Sequence: Synthetic polypeptide
EVQLLETGGGLVQPGGSLRLSCAASGFSFSSYAMSWVRQAPGKGLEWVSAISGSGGSTYYADSVKGRFTISRDNSKNTLYLQMNSLRAEDTAVYYCAKALVGATGAFDIWGQGTLVTVSS

SEQ ID NO: 1162 - protein, 109 aa, synthetic construct
  REGION 1..109: note = Description of Artificial Sequence: Synthetic polypeptide
EIVLTQSPGTLSLSPGERATLSCRASQSLSSNFLAWYQQKPGQAPGLLIYGASNWATGTPDRFSGSGSGTDFTLTITRLEPEDFAVYYCQYYGTSPMYTFGQGTKVEIK

SEQ ID NO: 1163 - protein, 488 aa, synthetic construct
  REGION 1..488: note = Description of Artificial Sequence: Synthetic polypeptide
MALPVTALLLPLALLLHAARPEVQLLETGGGLVQPGGSLRLSCAASGFSFSSYAMSWVRQAPGKGLEWVSAISGSGGSTYYADSVKGRFTISRDNSKNTLYLQMNSLRAEDTAVYYCAKALVGATGAFDIWGQGTLVTVSSGGGGSGGGGSGGGGSEIVLTQSPGTLSLSPGERATLSCRASQSLSSNFLAWYQQKPGQAPGLLIYGASNWATGTPDRFSGSGSGTDFTLTITRLEPEDFAVYYCQYYGTSPMYTFGQGTKVEIKTTTPAPRPPTPAPTIASQPLSLRPEACRPAAGGAVHTRGLDFACDIYIWAPLAGTCGVLLLSLVITLYCKRGRKKLLYIFKQPFMRPVQTTQEEDGCSCRFPEEEEGGCELRVKFSRSADAPAYKQGQNQLYNELNLGRREEYDVLDKRRGRDPEMGGKPRRKNPQEGLYNELQKDKMAEAYSEIGMKGERRRGKGHDGLYQGLSTATKDTYDALHMQALPPR

SEQ ID NO: 1164 - DNA, 1464 bp, synthetic construct
  misc_feature 1..1464: note = Description of Artificial Sequence: Synthetic polynucleotide
  source 1..1464: mol_type = other DNA
atggccctccctgtcaccgccctgctgcttccgctggctcttctgctccacgccgctcggcccgaagtgcagctgctcgaaaccggtggagggctggtgcagccagggggctccctgaggctttcatgcgccgctagcggattctccttctcctcttacgccatgtcgtgggtccgccaagcccctggaaaaggcctggaatgggtgtccgcgatttccgggagcggaggttcgacctattacgccgactccgtgaagggccgctttaccatctcccgggataactccaagaacactctgtacctccaaatgaactcgctgagagccgaggacaccgccgtgtattactgcgcgaaggcgctggtcggcgcgactggggcattcgacatctggggacagggaactcttgtgaccgtgtcgagcggaggcggcggctccggcggaggagggagcgggggcggtggttccgaaatcgtgttgactcagtccccgggaaccctgagcttgtcacccggggagcgggccactctctcctgtcgcgcctcccaatcgctctcatccaatttcctggcctggtaccagcagaagcccggacaggccccgggcctgctcatctacggcgcttcaaactgggcaacgggaacccctgatcggttcagcggaagcggatcgggtactgactttaccctgaccatcaccagactggaaccggaggacttcgccgtgtactactgccagtactacggcacctcccccatgtacacattcggacagggtaccaaggtcgagattaagaccactaccccagcaccgaggccacccaccccggctcctaccatcgcctcccagcctctgtccctgcgtccggaggcatgtagacccgcagctggtggggccgtgcatacccggggtcttgacttcgcctgcgatatctacatttgggcccctctggctggtacttgcggggtcctgctgctttcactcgtgatcactctttactgtaagcgcggtcggaagaagctgctgtacatctttaagcaacccttcatgaggcctgtgcagactactcaagaggaggacggctgttcatgccggttcccagaggaggaggaaggcggctgcgaactgcgcgtgaaattcagccgcagcgcagatgctccagcctacaagcaggggcagaaccagctctacaacgaactcaatcttggtcggagagaggagtacgacgtgctggacaagcggagaggacgggacccagaaatgggcgggaagccgcgcagaaagaatccccaagagggcctgtacaacgagctccaaaaggataagatggcagaagcctatagcgagattggtatgaaaggggaacgcagaagaggcaaaggccacgacggactgtaccagggactcagcaccgccaccaaggacacctatgacgctcttcacatgcaggccctgccgcctcgg

SEQ ID NO: 1165 - protein, 244 aa, synthetic construct
  REGION 1..244: note = Description of Artificial Sequence: Synthetic polypeptide
EVQLLESGGGLVQPGGSLRLSCAASGFTFSSYAMSWVRQAPGKGLEWVSAISGSGGSTYYADSVKGRFTISRDNSKNTLYLQMNSLRAEDTAVYYCVLWFGEGFDPWGQGTLVTVSSGGGGSGGGGSGGGGSDIVLTQSPLSLPVTPGEPASISCRSSQSLLHSNGYNYLDWYLQKPGQSPQLLIYLGSNRASGVPDRFSGSGSGTDFTLKISRVEAEDVGVYYCMQALQTPLTFGGGTKVDIK

SEQ ID NO: 1166 - DNA, 733 bp, synthetic construct
  misc_feature 1..733: note = Description of Artificial Sequence: Synthetic polynucleotide
  source 1..733: mol_type = other DNA
gaagtgcagctgcttgagagcggtggaggtctggtgcagcccgggggatcactgcgcctgtcctgtgccgcgtccggtttcactttctcctcgtacgccatgtcgtgggtcagacaggcaccgggaaagggactggaatgggtgtcagccatttcgggttcggggggcagcacctactacgctgactccgtgaagggccggttcaccatttcccgcgacaactccaagaacaccttgtacctccaaatgaactccctgcgggccgaagataccgccgtgtattactgcgtgctgtggttcggagagggattcgacccgtggggacaaggaacactcgtgactgtgtcatccggcggaggcggcagcggtggcggcggttccggcggcggcggatctgacatcgtgttgacccagtcccctctgagcctgccggtcactcctggcgaaccagccagcatctcctgccggtcgagccagtccctcctgcactccaatgggtacaactacctcgattggtatctgcaaaagccgggccagagcccccagctgctgatctaccttgggtcaaaccgcgcttccggggtgcctgatagattctccgggtccgggagcggaaccgactttaccctgaaaatctcgagggtggaggccgaggacgtcggagtgtactactgcatgcaggcgctccagactcccctgaccttcggaggaggaacgaaggtcgacatcaaga

SEQ ID NO: 1167 - protein, 117 aa, synthetic construct
  REGION 1..117: note = Description of Artificial Sequence: Synthetic polypeptide
EVQLLESGGGLVQPGGSLRLSCAASGFTFSSYAMSWVRQAPGKGLEWVSAISGSGGSTYYADSVKGRFTISRDNSKNTLYLQMNSLRAEDTAVYYCVLWFGEGFDPWGQGTLVTVSS

SEQ ID NO: 1168 - protein, 112 aa, synthetic construct
  REGION 1..112: note = Description of Artificial Sequence: Synthetic polypeptide
DIVLTQSPLSLPVTPGEPASISCRSSQSLLHSNGYNYLDWYLQKPGQSPQLLIYLGSNRASGVPDRFSGSGSGTDFTLKISRVEAEDVGVYYCMQALQTPLTFGGGTKVDIK

SEQ ID NO: 1169 - protein, 488 aa, synthetic construct
  REGION 1..488: note = Description of Artificial Sequence: Synthetic polypeptide
MALPVTALLLPLALLLHAARPEVQLLESGGGLVQPGGSLRLSCAASGFTFSSYAMSWVRQAPGKGLEWVSAISGSGGSTYYADSVKGRFTISRDNSKNTLYLQMNSLRAEDTAVYYCVLWFGEGFDPWGQGTLVTVSSGGGGSGGGGSGGGGSDIVLTQSPLSLPVTPGEPASISCRSSQSLLHSNGYNYLDWYLQKPGQSPQLLIYLGSNRASGVPDRFSGSGSGTDFTLKISRVEAEDVGVYYCMQALQTPLTFGGGTKVDIKTTTPAPRPPTPAPTIASQPLSLRPEACRPAAGGAVHTRGLDFACDIYIWAPLAGTCGVLLLSLVITLYCKRGRKKLLYIFKQPFMRPVQTTQEEDGCSCRFPEEEEGGCELRVKFSRSADAPAYKQGQNQLYNELNLGRREEYDVLDKRRGRDPEMGGKPRRKNPQEGLYNELQKDKMAEAYSEIGMKGERRRGKGHDGLYQGLSTATKDTYDALHMQALPPR

SEQ ID NO: 1170 - DNA, 1464 bp, synthetic construct
  misc_feature 1..1464: note = Description of Artificial Sequence: Synthetic polynucleotide
  source 1..1464: mol_type = other DNA
atggccctccctgtcaccgccctgctgcttccgctggctcttctgctccacgccgctcggcccgaagtgcagctgcttgagagcggtggaggtctggtgcagcccgggggatcactgcgcctgtcctgtgccgcgtccggtttcactttctcctcgtacgccatgtcgtgggtcagacaggcaccgggaaagggactggaatgggtgtcagccatttcgggttcggggggcagcacctactacgctgactccgtgaagggccggttcaccatttcccgcgacaactccaagaacaccttgtacctccaaatgaactccctgcgggccgaagataccgccgtgtattactgcgtgctgtggttcggagagggattcgacccgtggggacaaggaacactcgtgactgtgtcatccggcggaggcggcagcggtggcggcggttccggcggcggcggatctgacatcgtgttgacccagtcccctctgagcctgccggtcactcctggcgaaccagccagcatctcctgccggtcgagccagtccctcctgcactccaatgggtacaactacctcgattggtatctgcaaaagccgggccagagcccccagctgctgatctaccttgggtcaaaccgcgcttccggggtgcctgatagattctccgggtccgggagcggaaccgactttaccctgaaaatctcgagggtggaggccgaggacgtcggagtgtactactgcatgcaggcgctccagactcccctgaccttcggaggaggaacgaaggtcgacatcaagaccactaccccagcaccgaggccacccaccccggctcctaccatcgcctcccagcctctgtccctgcgtccggaggcatgtagacccgcagctggtggggccgtgcatacccggggtcttgacttcgcctgcgatatctacatttgggcccctctggctggtacttgcggggtcctgctgctttcactcgtgatcactctttactgtaagcgcggtcggaagaagctgctgtacatctttaagcaacccttcatgaggcctgtgcagactactcaagaggaggacggctgttcatgccggttcccagaggaggaggaaggcggctgcgaactgcgcgtgaaattcagccgcagcgcagatgctccagcctacaagcaggggcagaaccagctctacaacgaactcaatcttggtcggagagaggagtacgacgtgctggacaagcggagaggacgggacccagaaatgggcgggaagccgcgcagaaagaatccccaagagggcctgtacaacgagctccaaaaggataagatggcagaagcctatagcgagattggtatgaaaggggaacgcagaagaggcaaaggccacgacggactgtaccagggactcagcaccgccaccaaggacacctatgacgctcttcacatgcaggccctgccgcctcgg

SEQ ID NO: 1171 - protein, 251 aa, synthetic construct
  REGION 1..251: note = Description of Artificial Sequence: Synthetic polypeptide
QVQLVESGGGLVQPGGSLRLSCAASGFTFSSYAMSWVRQAPGKGLEWVSAISGSGGSTYYADSVKGRFTISRDNSKNTLYLQMNSLRAEDTAVYYCAKVGYDSSGYYRDYYGMDVWGQGTTVTVSSGGGGSGGGGSGGGGSEIVLTQSPGTLSLSPGERATLSCRASQSVSSSYLAWYQQKPGQAPRLLIYGTSSRATGISDRFSGSGSGTDFTLTISRLEPEDFAVYYCQHYGNSPPKFTFGPGTKLEIK

SEQ ID NO: 1172 - DNA, 753 bp, synthetic construct
  misc_feature 1..753: note = Description of Artificial Sequence: Synthetic polynucleotide
  source 1..753: mol_type = other DNA
caagtgcagctcgtggagtcaggcggaggactggtgcagcccgggggctccctgagactttcctgcgcggcatcgggttttaccttctcctcctatgctatgtcctgggtgcgccaggccccgggaaagggactggaatgggtgtccgcaatcagcggtagcgggggctcaacatactacgccgactccgtcaagggtcgcttcactatttcccgggacaactccaagaataccctgtacctccaaatgaacagcctcagggccgaggatactgccgtgtactactgcgccaaagtcggatacgatagctccggttactaccgggactactacggaatggacgtgtggggacagggcaccaccgtgaccgtgtcaagcggcggaggcggttcaggagggggaggctccggcggtggagggtccgaaatcgtcctgactcagtcgcctggcactctgtcgttgtccccgggggagcgcgctaccctgtcgtgtcgggcgtcgcagtccgtgtcgagctcctacctcgcgtggtaccagcagaagcccggacaggcccctagacttctgatctacggcacttcttcacgcgccaccgggatcagcgacaggttcagcggctccggctccgggaccgacttcaccctgaccattagccggctggagcctgaagatttcgccgtgtattactgccaacactacggaaactcgccgccaaagttcacgttcggacccggaaccaagctggaaatcaag

SEQ ID NO: 1173 - protein, 126 aa, synthetic construct
  REGION 1..126: note = Description of Artificial Sequence: Synthetic polypeptide
QVQLVESGGGLVQPGGSLRLSCAASGFTFSSYAMSWVRQAPGKGLEWVSAISGSGGSTYYADSVKGRFTISRDNSKNTLYLQMNSLRAEDTAVYYCAKVGYDSSGYYRDYYGMDVWGQGTTVTVSS

SEQ ID NO: 1174 - protein, 110 aa, synthetic construct
  REGION 1..110: note = Description of Artificial Sequence: Synthetic polypeptide
EIVLTQSPGTLSLSPGERATLSCRASQSVSSSYLAWYQQKPGQAPRLLIYGTSSRATGISDRFSGSGSGTDFTLTISRLEPEDFAVYYCQHYGNSPPKFTFGPGTKLEIK

SEQ ID NO: 1175 - protein, 495 aa, synthetic construct
  REGION 1..495: note = Description of Artificial Sequence: Synthetic polypeptide
MALPVTALLLPLALLLHAARPQVQLVESGGGLVQPGGSLRLSCAASGFTFSSYAMSWVRQAPGKGLEWVSAISGSGGSTYYADSVKGRFTISRDNSKNTLYLQMNSLRAEDTAVYYCAKVGYDSSGYYRDYYGMDVWGQGTTVTVSSGGGGSGGGGSGGGGSEIVLTQSPGTLSLSPGERATLSCRASQSVSSSYLAWYQQKPGQAPRLLIYGTSSRATGISDRFSGSGSGTDFTLTISRLEPEDFAVYYCQHYGNSPPKFTFGPGTKLEIKTTTPAPRPPTPAPTIASQPLSLRPEACRPAAGGAVHTRGLDFACDIYIWAPLAGTCGVLLLSLVITLYCKRGRKKLLYIFKQPFMRPVQTTQEEDGCSCRFPEEEEGGCELRVKFSRSADAPAYKQGQNQLYNELNLGRREEYDVLDKRRGRDPEMGGKPRRKNPQEGLYNELQKDKMAEAYSEIGMKGERRRGKGHDGLYQGLSTATKDTYDALHMQALPPR

SEQ ID NO: 1176 - DNA, 1485 bp, synthetic construct
  misc_feature 1..1485: note = Description of Artificial Sequence: Synthetic polynucleotide
  source 1..1485: mol_type = other DNA
atggccctccctgtcaccgccctgctgcttccgctggctcttctgctccacgccgctcggccccaagtgcagctcgtggagtcaggcggaggactggtgcagcccgggggctccctgagactttcctgcgcggcatcgggttttaccttctcctcctatgctatgtcctgggtgcgccaggccccgggaaagggactggaatgggtgtccgcaatcagcggtagcgggggctcaacatactacgccgactccgtcaagggtcgcttcactatttcccgggacaactccaagaataccctgtacctccaaatgaacagcctcagggccgaggatactgccgtgtactactgcgccaaagtcggatacgatagctccggttactaccgggactactacggaatggacgtgtggggacagggcaccaccgtgaccgtgtcaagcggcggaggcggttcaggagggggaggctccggcggtggagggtccgaaatcgtcctgactcagtcgcctggcactctgtcgttgtccccgggggagcgcgctaccctgtcgtgtcgggcgtcgcagtccgtgtcgagctcctacctcgcgtggtaccagcagaagcccggacaggcccctagacttctgatctacggcacttcttcacgcgccaccgggatcagcgacaggttcagcggctccggctccgggaccgacttcaccctgaccattagccggctggagcctgaagatttcgccgtgtattactgccaacactacggaaactcgccgccaaagttcacgttcggacccggaaccaagctggaaatcaagaccactaccccagcaccgaggccacccaccccggctcctaccatcgcctcccagcctctgtccctgcgtccggaggcatgtagacccgcagctggtggggccgtgcatacccggggtcttgacttcgcctgcgatatctacatttgggcccctctggctggtacttgcggggtcctgctgctttcactcgtgatcactctttactgtaagcgcggtcggaagaagctgctgtacatctttaagcaacccttcatgaggcctgtgcagactactcaagaggaggacggctgttcatgccggttcccagaggaggaggaaggcggctgcgaactgcgcgtgaaattcagccgcagcgcagatgctccagcctacaagcaggggcagaaccagctctacaacgaactcaatcttggtcggagagaggagtacgacgtgctggacaagcggagaggacgggacccagaaatgggcgggaagccgcgcagaaagaatccccaagagggcctgtacaacgagctccaaaaggataagatggcagaagcctatagcgagattggtatgaaaggggaacgcagaagaggcaaaggccacgacggactgtaccagggactcagcaccgccaccaaggacacctatgacgctcttcacatgcaggccctgccgcctcgg

SEQ ID NO: 1177 - protein, 246 aa, synthetic construct
  REGION 1..246: note = Description of Artificial Sequence: Synthetic polypeptide
EVQLVESGGGLVQPGGSLRLSCAASGFTFSSYAMSWVRQAPGKGLEWVSAISGSGGSTYYADSVKGRFTISRDNSKNTLYLQMNSLRAEDTAVYYCAKMGWSSGYLGAFDIWGQGTTVTVSSGGGGSGGGGSGGGGSEIVLTQSPGTLSLSPGERATLSCRASQSVASSFLAWYQQKPGQAPRLLIYGASGRATGIPDRFSGSGSGTDFTLTISRLEPEDFAVYYCQHYGGSPRLTFGGGTKVDIK

SEQ ID NO: 1178 - DNA, 739 bp, synthetic construct
  misc_feature 1..739: note = Description of Artificial Sequence: Synthetic polynucleotide
  source 1..739: mol_type = other DNA
gaagtccaactggtggagtccgggggagggctcgtgcagcccggaggcagccttcggctgtcgtgcgccgcctccgggttcacgttctcatcctacgcgatgtcgtgggtcagacaggcaccaggaaagggactggaatgggtgtccgccattagcggctccggcggtagcacctactatgccgactcagtgaagggaaggttcactatctcccgcgacaacagcaagaacaccctgtacctccaaatgaactctctgcgggccgaggataccgcggtgtactattgcgccaagatgggttggtccagcggatacttgggagccttcgacatttggggacagggcactactgtgaccgtgtcctccgggggtggcggatcgggaggcggcggctcgggtggagggggttccgaaatcgtgttgacccagtcaccgggaaccctctcgctgtccccgggagaacgggctacactgtcatgtagagcgtcccagtccgtggcttcctcgttcctggcctggtaccagcagaagccgggacaggcaccccgcctgctcatctacggagccagcggccgggcgaccggcatccctgaccgcttctccggttccggctcgggcaccgactttactctgaccattagcaggcttgagcccgaggattttgccgtgtactactgccaacactacggggggagccctcgcctgaccttcggaggcggaactaaggtcgatatcaaaa

SEQ ID NO: 1179 - protein, 122 aa, synthetic construct
  REGION 1..122: note = Description of Artificial Sequence: Synthetic polypeptide
EVQLVESGGGLVQPGGSLRLSCAASGFTFSSYAMSWVRQAPGKGLEWVSAISGSGGSTYYADSVKGRFTISRDNSKNTLYLQMNSLRAEDTAVYYCAKMGWSSGYLGAFDIWGQGTTVTVSS

SEQ ID NO: 1180 - protein, 109 aa, synthetic construct
  REGION 1..109: note = Description of Artificial Sequence: Synthetic polypeptide
EIVLTQSPGTLSLSPGERATLSCRASQSVASSFLAWYQQKPGQAPRLLIYGASGRATGIPDRFSGSGSGTDFTLTISRLEPEDFAVYYCQHYGGSPRLTFGGGTKVDIK

SEQ ID NO: 1181 - protein, 490 aa, synthetic construct
  REGION 1..490: note = Description of Artificial Sequence: Synthetic polypeptide
MALPVTALLLPLALLLHAARPEVQLVESGGGLVQPGGSLRLSCAASGFTFSSYAMSWVRQAPGKGLEWVSAISGSGGSTYYADSVKGRFTISRDNSKNTLYLQMNSLRAEDTAVYYCAKMGWSSGYLGAFDIWGQGTTVTVSSGGGGSGGGGSGGGGSEIVLTQSPGTLSLSPGERATLSCRASQSVASSFLAWYQQKPGQAPRLLIYGASGRATGIPDRFSGSGSGTDFTLTISRLEPEDFAVYYCQHYGGSPRLTFGGGTKVDIKTTTPAPRPPTPAPTIASQPLSLRPEACRPAAGGAVHTRGLDFACDIYIWAPLAGTCGVLLLSLVITLYCKRGRKKLLYIFKQPFMRPVQTTQEEDGCSCRFPEEEEGGCELRVKFSRSADAPAYKQGQNQLYNELNLGRREEYDVLDKRRGRDPEMGGKPRRKNPQEGLYNELQKDKMAEAYSEIGMKGERRRGKGHDGLYQGLSTATKDTYDALHMQALPPR

SEQ ID NO: 1182 - DNA, 1470 bp, synthetic construct
  misc_feature 1..1470: note = Description of Artificial Sequence: Synthetic polynucleotide
  source 1..1470: mol_type = other DNA
atggccctccctgtcaccgccctgctgcttccgctggctcttctgctccacgccgctcggcccgaagtccaactggtggagtccgggggagggctcgtgcagcccggaggcagccttcggctgtcgtgcgccgcctccgggttcacgttctcatcctacgcgatgtcgtgggtcagacaggcaccaggaaagggactggaatgggtgtccgccattagcggctccggcggtagcacctactatgccgactcagtgaagggaaggttcactatctcccgcgacaacagcaagaacaccctgtacctccaaatgaactctctgcgggccgaggataccgcggtgtactattgcgccaagatgggttggtccagcggatacttgggagccttcgacatttggggacagggcactactgtgaccgtgtcctccgggggtggcggatcgggaggcggcggctcgggtggagggggttccgaaatcgtgttgacccagtcaccgggaaccctctcgctgtccccgggagaacgggctacactgtcatgtagagcgtcccagtccgtggcttcctcgttcctggcctggtaccagcagaagccgggacaggcaccccgcctgctcatctacggagccagcggccgggcgaccggcatccctgaccgcttctccggttccggctcgggcaccgactttactctgaccattagcaggcttgagcccgaggattttgccgtgtactactgccaacactacggggggagccctcgcctgaccttcggaggcggaactaaggtcgatatcaaaaccactaccccagcaccgaggccacccaccccggctcctaccatcgcctcccagcctctgtccctgcgtccggaggcatgtagacccgcagctggtggggccgtgcatacccggggtcttgacttcgcctgcgatatctacatttgggcccctctggctggtacttgcggggtcctgctgctttcactcgtgatcactctttactgtaagcgcggtcggaagaagctgctgtacatctttaagcaacccttcatgaggcctgtgcagactactcaagaggaggacggctgttcatgccggttcccagaggaggaggaaggcggctgcgaactgcgcgtgaaattcagccgcagcgcagatgctccagcctacaagcaggggcagaaccagctctacaacgaactcaatcttggtcggagagaggagtacgacgtgctggacaagcggagaggacgggacccagaaatgggcgggaagccgcgcagaaagaatccccaagagggcctgtacaacgagctccaaaaggataagatggcagaagcctatagcgagattggtatgaaaggggaacgcagaagaggcaaaggccacgacggactgtaccagggactcagcaccgccaccaaggacacctatgacgctcttcacatgcaggccctgccgcctcgg

SEQ ID NO: 1183 - protein, 122 aa, synthetic construct
  REGION 1..122: note = Description of Artificial Sequence: Synthetic polypeptide
QIQLVQSGPDLKKPGETVKLSCKASGYTFTNFGMNWVKQAPGKGFKWMAWINTYTGESYFADDFKGRFAFSVETSATTAYLQINNLKTEDTATYFCARGEIYYGYDGGFAYWGQGTLVTVSA

SEQ ID NO: 1184 - protein, 107 aa, synthetic construct
  REGION 1..107: note = Description of Artificial Sequence: Synthetic polypeptide
DVVMTQSHRFMSTSVGDRVSITCRASQDVNTAVSWYQQKPGQSPKLLIFSASYRYTGVPDRFTGSGSGADFTLTISSVQAEDLAVYYCQQHYSTPWTFGGGTKLDIK

SEQ ID NO: 1185 - protein, 244 aa, synthetic construct
  REGION 1..244: note = Description of Artificial Sequence: Synthetic polypeptide
QIQLVQSGPDLKKPGETVKLSCKASGYTFTNFGMNWVKQAPGKGFKWMAWINTYTGESYFADDFKGRFAFSVETSATTAYLQINNLKTEDTATYFCARGEIYYGYDGGFAYWGQGTLVTVSAGGGGSGGGGSGGGGSDVVMTQSHRFMSTSVGDRVSITCRASQDVNTAVSWYQQKPGQSPKLLIFSASYRYTGVPDRFTGSGSGADFTLTISSVQAEDLAVYYCQQHYSTPWTFGGGTKLDIK

SEQ ID NO: 1186 - protein, 467 aa, synthetic construct
  REGION 1..467: note = Description of Artificial Sequence: Synthetic polypeptide
QIQLVQSGPDLKKPGETVKLSCKASGYTFTNFGMNWVKQAPGKGFKWMAWINTYTGESYFADDFKGRFAFSVETSATTAYLQINNLKTEDTATYFCARGEIYYGYDGGFAYWGQGTLVTVSAGGGGSGGGGSGGGGSDVVMTQSHRFMSTSVGDRVSITCRASQDVNTAVSWYQQKPGQSPKLLIFSASYRYTGVPDRFTGSGSGADFTLTISSVQAEDLAVYYCQQHYSTPWTFGGGTKLDIKTTTPAPRPPTPAPTIASQPLSLRPEACRPAAGGAVHTRGLDFACDIYIWAPLAGTCGVLLLSLVITLYCKRGRKKLLYIFKQPFMRPVQTTQEEDGCSCRFPEEEEGGCELRVKFSRSADAPAYKQGQNQLYNELNLGRREEYDVLDKRRGRDPEMGGKPRRKNPQEGLYNELQKDKMAEAYSEIGMKGERRRGKGHDGLYQGLSTATKDTYDALHMQALPPR

SEQ ID NO: 1187 - protein, 117 aa, synthetic construct
  REGION 1..117: note = Description of Artificial Sequence: Synthetic polypeptide
QIQLVQSGPELKKPGETVKISCKASGYTFTDYSINWVKRAPGKGLKWMGWINTETREPAYAYDFRGRFAFSLETSASTAYLQINNLKYEDTATYFCALDYSYAMDYWGQGTSVTVSS

SEQ ID NO: 1188 - protein, 111 aa, synthetic construct
  REGION 1..111: note = Description of Artificial Sequence: Synthetic polypeptide
DIVLTQSPASLAMSLGKRATISCRASESVSVIGAHLIHWYQQKPGQPPKLLIYLASNLETGVPARFSGSGSGTDFTLTIDPVEEDDVAIYSCLQSRIFPRTFGGGTKLEIK

SEQ ID NO: 1189 - protein, 249 aa, synthetic construct
  REGION 1..249: note = Description of Artificial Sequence: Synthetic polypeptide
QIQLVQSGPELKKPGETVKISCKASGYTFTDYSINWVKRAPGKGLKWMGWINTETREPAYAYDFRGRFAFSLETSASTAYLQINNLKYEDTATYFCALDYSYAMDYWGQGTSVTVSSGGGGSGGGGSGGGGSQIQLVQSGPELKKPGETVKISCKASGYTFTDYSINWVKRAPGKGLKWMGWINTETREPAYAYDFRGRFAFSLETSASTAYLQINNLKYEDTATYFCALDYSYAMDYWGQGTSVTVSS

SEQ ID NO: 1190 - protein, 472 aa, synthetic construct
  REGION 1..472: note = Description of Artificial Sequence: Synthetic polypeptide
QIQLVQSGPELKKPGETVKISCKASGYTFTDYSINWVKRAPGKGLKWMGWINTETREPAYAYDFRGRFAFSLETSASTAYLQINNLKYEDTATYFCALDYSYAMDYWGQGTSVTVSSGGGGSGGGGSGGGGSQIQLVQSGPELKKPGETVKISCKASGYTFTDYSINWVKRAPGKGLKWMGWINTETREPAYAYDFRGRFAFSLETSASTAYLQINNLKYEDTATYFCALDYSYAMDYWGQGTSVTVSSTTTPAPRPPTPAPTIASQPLSLRPEACRPAAGGAVHTRGLDFACDIYIWAPLAGTCGVLLLSLVITLYCKRGRKKLLYIFKQPFMRPVQTTQEEDGCSCRFPEEEEGGCELRVKFSRSADAPAYKQGQNQLYNELNLGRREEYDVLDKRRGRDPEMGGKPRRKNPQEGLYNELQKDKMAEAYSEIGMKGERRRGKGHDGLYQGLSTATKDTYDALHMQALPPR

SEQ ID NO: 1191 - protein, 117 aa, synthetic construct
  REGION 1..117: note = Description of Artificial Sequence: Synthetic polypeptide
QIQLVQSGPELKKPGETVKISCKASGYTFRHYSMNWVKQAPGKGLKWMGRINTESGVPIYADDFKGRFAFSVETSASTAYLVINNLKDEDTASYFCSNDYLYSLDFWGQGTALTVSS

SEQ ID NO: 1192 - protein, 111 aa, synthetic construct
  REGION 1..111: note = Description of Artificial Sequence: Synthetic polypeptide
DIVLTQSPPSLAMSLGKRATISCRASESVTILGSHLIYWYQQKPGQPPTLLIQLASNVQTGVPARFSGSGSRTDFTLTIDPVEEDDVAVYYCLQSRTIPRTFGGGTKLEIK

SEQ ID NO: 1193 - protein, 243 aa, synthetic construct
  REGION 1..243: note = Description of Artificial Sequence: Synthetic polypeptide
QIQLVQSGPELKKPGETVKISCKASGYTFRHYSMNWVKQAPGKGLKWMGRINTESGVPIYADDFKGRFAFSVETSASTAYLVINNLKDEDTASYFCSNDYLYSLDFWGQGTALTVSSGGGGSGGGGSGGGGSDIVLTQSPPSLAMSLGKRATISCRASESVTILGSHLIYWYQQKPGQPPTLLIQLASNVQTGVPARFSGSGSRTDFTLTIDPVEEDDVAVYYCLQSRTIPRTFGGGTKLEIK

SEQ ID NO: 1194 - protein, 466 aa, synthetic construct
  REGION 1..466: note = Description of Artificial Sequence: Synthetic polypeptide
QIQLVQSGPELKKPGETVKISCKASGYTFRHYSMNWVKQAPGKGLKWMGRINTESGVPIYADDFKGRFAFSVETSASTAYLVINNLKDEDTASYFCSNDYLYSLDFWGQGTALTVSSGGGGSGGGGSGGGGSDIVLTQSPPSLAMSLGKRATISCRASESVTILGSHLIYWYQQKPGQPPTLLIQLASNVQTGVPARFSGSGSRTDFTLTIDPVEEDDVAVYYCLQSRTIPRTFGGGTKLEIKTTTPAPRPPTPAPTIASQPLSLRPEACRPAAGGAVHTRGLDFACDIYIWAPLAGTCGVLLLSLVITLYCKRGRKKLLYIFKQPFMRPVQTTQEEDGCSCRFPEEEEGGCELRVKFSRSADAPAYKQGQNQLYNELNLGRREEYDVLDKRRGRDPEMGGKPRRKNPQEGLYNELQKDKMAEAYSEIGMKGERRRGKGHDGLYQGLSTATKDTYDALHMQALPPR

SEQ ID NO: 1195 - protein, 117 aa, synthetic construct
  REGION 1..117: note = Description of Artificial Sequence: Synthetic polypeptide
QIQLVQSGPELKKPGETVKISCKASGYTFTHYSMNWVKQAPGKGLKWMGRINTETGEPLYADDFKGRFAFSLETSASTAYLVINNLKNEDTATFFCSNDYLYSCDYWGQGTTLTVSS

SEQ ID NO: 1196 - protein, 111 aa, synthetic construct; identical to SEQ ID NO: 1192
  REGION 1..111: note = Description of Artificial Sequence: Synthetic polypeptide

SEQ ID NO: 1197 - protein, 243 aa, synthetic construct
  REGION 1..243: note = Description of Artificial Sequence: Synthetic polypeptide
QIQLVQSGPELKKPGETVKISCKASGYTFTHYSMNWVKQAPGKGLKWMGRINTETGEPLYADDFKGRFAFSLETSASTAYLVINNLKNEDTATFFCSNDYLYSCDYWGQGTTLTVSSGGGGSGGGGSGGGGSDIVLTQSPPSLAMSLGKRATISCRASESVTILGSHLIYWYQQKPGQPPTLLIQLASNVQTGVPARFSGSGSRTDFTLTIDPVEEDDVAVYYCLQSRTIPRTFGGGTKLEIK

SEQ ID NO: 1198 - protein, 466 aa, synthetic construct
  REGION 1..466: note = Description of Artificial Sequence: Synthetic polypeptide
QIQLVQSGPELKKPGETVKISCKASGYTFTHYSMNWVKQAPGKGLKWMGRINTETGEPLYADDFKGRFAFSLETSASTAYLVINNLKNEDTATFFCSNDYLYSCDYWGQGTTLTVSSGGGGSGGGGSGGGGSDIVLTQSPPSLAMSLGKRATISCRASESVTILGSHLIYWYQQKPGQPPTLLIQLASNVQTGVPARFSGSGSRTDFTLTIDPVEEDDVAVYYCLQSRTIPRTFGGGTKLEIKTTTPAPRPPTPAPTIASQPLSLRPEACRPAAGGAVHTRGLDFACDIYIWAPLAGTCGVLLLSLVITLYCKRGRKKLLYIFKQPFMRPVQTTQEEDGCSCRFPEEEEGGCELRVKFSRSADAPAYKQGQNQLYNELNLGRREEYDVLDKRRGRDPEMGGKPRRKNPQEGLYNELQKDKMAEAYSEIGMKGERRRGKGHDGLYQGLSTATKDTYDALHMQALPPR

SEQ ID NO: 1199 - protein, 5 aa, synthetic construct
  REGION 1..5: note = Description of Artificial Sequence: Synthetic peptide
NHGMS

SEQ ID NO: 1200 - protein, 5 aa, synthetic construct
  REGION 1..5: note = Description of Artificial Sequence: Synthetic peptide
NYAMS

SEQ ID NO: 1201 - protein, 5 aa, synthetic construct
  REGION 1..5: note = Description of Artificial Sequence: Synthetic peptide
DYAMH

SEQ ID NO: 1202 - protein, 5 aa, synthetic construct
  REGION 1..5: note = Description of Artificial Sequence: Synthetic peptide
NHGMS

SEQ ID NO: 1203 - protein, 5 aa, synthetic construct
  REGION 1..5: note = Description of Artificial Sequence: Synthetic peptide
NFGIN

SEQ ID NO: 1204 - protein, 5 aa, synthetic construct
  REGION 1..5: note = Description of Artificial Sequence: Synthetic peptide
SDAMT

SEQ ID NO: 1205 - protein, 5 aa, synthetic construct
  REGION 1..5: note = Description of Artificial Sequence: Synthetic peptide
NYGIT

SEQ ID NO: 1206 - protein, 5 aa, synthetic construct
  REGION 1..5: note = Description of Artificial Sequence: Synthetic peptide
NHGMS

SEQ ID NO: 1207 - protein, 5 aa, synthetic construct
  REGION 1..5: note = Description of Artificial Sequence: Synthetic peptide
NHGMS

SEQ ID NO: 1208 - protein, 5 aa, synthetic construct
  REGION 1..5: note = Description of Artificial Sequence: Synthetic peptide
NHGMS

SEQ ID NO: 1209 - protein, 5 aa, synthetic construct
  REGION 1..5: note = Description of Artificial Sequence: Synthetic peptide
DYYMS

SEQ ID NO: 1210 - protein, 5 aa, synthetic construct
  REGION 1..5: note = Description of Artificial Sequence: Synthetic peptide
DYYMS

SEQ ID NO: 1211 - protein, 5 aa, synthetic construct
  REGION 1..5: note = Description of Artificial Sequence: Synthetic peptide
NHGMS

SEQ ID NO: 1212 - protein, 5 aa, synthetic construct
  REGION 1..5: note = Description of Artificial Sequence: Synthetic peptide
NHGMS

SEQ ID NO: 1213 - protein, 5 aa, synthetic construct
  REGION 1..5: note = Description of Artificial Sequence: Synthetic peptide
NHGMS

SEQ ID NO: 1214 - protein, 7 aa, synthetic construct
  REGION 1..7: note = Description of Artificial Sequence: Synthetic peptide
SSYYYWG

SEQ ID NO: 1215 - protein, 7 aa, synthetic construct
  REGION 1..7: note = Description of Artificial Sequence: Synthetic peptide
TSGMCVS

SEQ ID NO: 1216 - protein, 5 aa, synthetic construct
  REGION 1..5: note = Description of Artificial Sequence: Synthetic peptide
SYSMN

SEQ ID NO: 1217 - protein, 5 aa, synthetic construct
  REGION 1..5: note = Description of Artificial Sequence: Synthetic peptide
DYYMS

SEQ ID NO: 1218 - protein, 5 aa, synthetic construct
  REGION 1..5: note = Description of Artificial Sequence: Synthetic peptide
SHYIH

SEQ ID NO: 1219 - protein, 7 aa, synthetic construct
  REGION 1..7: note = Description of Artificial Sequence: Synthetic peptide
SGGYYWS

SEQ ID NO: 1220 - protein, 5 aa, synthetic construct
  REGION 1..5: note = Description of Artificial Sequence: Synthetic peptide
SYAIS

SEQ ID NO: 1221 - protein, 7 aa, synthetic construct
  REGION 1..7: note = Description of Artificial Sequence: Synthetic peptide
SNSAAWN

SEQ ID NO: 1222 - protein, 5 aa, synthetic construct
  REGION 1..5: note = Description of Artificial Sequence: Synthetic peptide
SYAMS

SEQ ID NO: 1223 - protein, 5 aa, synthetic construct
  REGION 1..5: note = Description of Artificial Sequence: Synthetic peptide
RYPMS

SEQ ID NO: 1224 - protein, 5 aa, synthetic construct
  REGION 1..5: note = Description of Artificial Sequence: Synthetic peptide
SYAMS

SEQ ID NO: 1225 - protein, 5 aa, synthetic construct
  REGION 1..5: note = Description of Artificial Sequence: Synthetic peptide
SYAMS

SEQ ID NO: 1226 - protein, 5 aa, synthetic construct
  REGION 1..5: note = Description of Artificial Sequence: Synthetic peptide
DYAMH

SEQ ID NO: 1227 - protein, 5 aa, synthetic construct
  REGION 1..5: note = Description of Artificial Sequence: Synthetic peptide
DYAMH

SEQ ID NO: 1228 - protein, 5 aa, synthetic construct
  REGION 1..5: note = Description of Artificial Sequence: Synthetic peptide
SYAMS

SEQ ID NO: 1229 - protein, 5 aa, synthetic construct
  REGION 1..5: note = Description of Artificial Sequence: Synthetic peptide
SYAMS

SEQ ID NO: 1230 - protein, 5 aa, synthetic construct
  REGION 1..5: note = Description of Artificial Sequence: Synthetic peptide
SYAMS

SEQ ID NO: 1231 - protein, 5 aa, synthetic construct
  REGION 1..5: note = Description of Artificial Sequence: Synthetic peptide
SYAMS

SEQ ID NO: 1232 - protein, 5 aa, synthetic construct
  REGION 1..5: note = Description of Artificial Sequence: Synthetic peptide
SYAMS

SEQ ID NO: 1233 - protein, 5 aa, synthetic construct
  REGION 1..5: note = Description of Artificial Sequence: Synthetic peptide
SYAMS

SEQ ID NO: 1234 - protein, 5 aa, synthetic construct
  REGION 1..5: note = Description of Artificial Sequence: Synthetic peptide
SYAMS

SEQ ID NO: 1235 - protein, 5 aa, synthetic construct
  REGION 1..5: note = Description of Artificial Sequence: Synthetic peptide
NFGMN

SEQ ID NO: 1236 - protein, 5 aa, synthetic construct
  REGION 1..5: note = Description of Artificial Sequence: Synthetic peptide
DYSIN

SEQ ID NO: 1237 - protein, 5 aa, synthetic construct
  REGION 1..5: note = Description of Artificial Sequence: Synthetic peptide
HYSMN

SEQ ID NO: 1238 - protein, 5 aa, synthetic construct
  REGION 1..5: note = Description of Artificial Sequence: Synthetic peptide
HYSMN

SEQ ID NO: 1239 - protein, 16 aa, synthetic construct
  REGION 1..16: note = Description of Artificial Sequence: Synthetic peptide
GIVYSGSTYYAASVKG

SEQ ID NO: 1240 - protein, 17 aa, synthetic construct
  REGION 1..17: note = Description of Artificial Sequence: Synthetic peptide
GISRSGENTYYADSVKG

SEQ ID NO: 1241 - protein, 17 aa, synthetic construct
  REGION 1..17: note = Description of Artificial Sequence: Synthetic peptide
GISWNSGSIGYADSVKG

SEQ ID NO: 1242 - protein, 16 aa, synthetic construct
  REGION 1..16: note = Description of Artificial Sequence: Synthetic peptide
GIVYSGSTYYAASVKG

SEQ ID NO: 1243 - protein, 17 aa, synthetic construct
  REGION 1..17: note = Description of Artificial Sequence: Synthetic peptide
WINPKNNNTNYAQKFQG

SEQ ID NO: 1244 - protein, 17 aa, synthetic construct
  REGION 1..17: note = Description of Artificial Sequence: Synthetic peptide
VISGSGGTTYYADSVKG

SEQ ID NO: 1245 - protein, 17 aa, synthetic construct
  REGION 1..17: note = Description of Artificial Sequence: Synthetic peptide
WISAYNGNTNYAQKFQG

SEQ ID NO: 1246 - protein, 16 aa, synthetic construct
  REGION 1..16: note = Description of Artificial Sequence: Synthetic peptide
GIVYSGSTYYAASVKG

SEQ ID NO: 1247 - protein, 16 aa, synthetic construct
  REGION 1..16: note = Description of Artificial Sequence: Synthetic peptide
GIVYSGSTYYAASVKG

SEQ ID NO: 1248 - protein, 16 aa, synthetic construct
  REGION 1..16: note = Description of Artificial Sequence: Synthetic peptide
GIVYSGSTYYAASVKG

SEQ ID NO: 1249 - protein, 17 aa, synthetic construct
  REGION 1..17: note = Description of Artificial Sequence: Synthetic peptide
YISSSGSTIYYADSVKG

SEQ ID NO: 1250 - protein, 17 aa, synthetic construct
  REGION 1..17: note = Description of Artificial Sequence: Synthetic peptide
YISSSGNTIYYADSVKG

SEQ ID NO: 1251 - protein, 16 aa, synthetic construct
  REGION 1..16: note = Description of Artificial Sequence: Synthetic peptide
GIVYSGSTYYAASVKG

SEQ ID NO: 1252 - protein, 16 aa, synthetic construct
  REGION 1..16: note = Description of Artificial Sequence: Synthetic peptide
GIVYSGSTYYAASVKG

SEQ ID NO: 1253 - protein, 16 aa, synthetic construct
  REGION 1..16: note = Description of Artificial Sequence: Synthetic peptide
GIVYSGSTYYAASVKG

SEQ ID NO: 1254 - protein, 16 aa, synthetic construct
  REGION 1..16: note = Description of Artificial Sequence: Synthetic peptide
SIYYSGSAYYNPSLKS

SEQ ID NO: 1255 - protein, 16 aa, synthetic construct
  REGION 1..16: note = Description of Artificial Sequence: Synthetic peptide
RIDWDEDKFYSTSLKT

SEQ ID NO: 1256 - protein, 17 aa, synthetic construct
  REGION 1..17: note = Description of Artificial Sequence: Synthetic peptide
SISSSSSYIYYADSVKG

SEQ ID NO: 1257 - protein, 17 aa, synthetic construct
  REGION 1..17: note = Description of Artificial Sequence: Synthetic peptide
YISSSGSTIYYADSVKG

SEQ ID NO: 1258 - protein, 17 aa, synthetic construct
  REGION 1..17: note = Description of Artificial Sequence: Synthetic peptide
MINPSGGVTAYSQTLQG

SEQ ID NO: 1259 - protein, 16 aa, synthetic construct
  REGION 1..16: note = Description of Artificial Sequence: Synthetic peptide
YIYYSGSTYYNPSLKS

SEQ ID NO: 1260 - protein, 17 aa, synthetic construct
  REGION 1..17: note = Description of Artificial Sequence: Synthetic peptide
GIIPIFGTANYAQKFQG

SEQ ID NO: 1261 - protein, 18 aa, synthetic construct
  REGION 1..18: note = Description of Artificial Sequence: Synthetic peptide
RTYYRSKWYSFYAISLKS

SEQ ID NO: 1262 - protein, 17 aa, synthetic construct
  REGION 1..17: note = Description of Artificial Sequence: Synthetic peptide
AISGSGGSTYYADSVKG

SEQ ID NO: 1263 - protein, 17 aa, synthetic construct
  REGION 1..17: note = Description of Artificial Sequence: Synthetic peptide
GISDSGVSTYYADSAKG

SEQ ID NO: 1264 - protein, 17 aa, synthetic construct
  REGION 1..17: note = Description of Artificial Sequence: Synthetic peptide
AISGSGGSTYYADSVKG

SEQ ID NO: 1265 - protein, 17 aa, synthetic construct
  REGION 1..17: note = Description of Artificial Sequence: Synthetic peptide
AISGSGGSTYYADSVKG

SEQ ID NO: 1266 - protein, 17 aa, synthetic construct
  REGION 1..17: note = Description of Artificial Sequence: Synthetic peptide
GISWNSGSIGYADSVKG

SEQ ID NO: 1267 - protein, 17 aa, synthetic construct
  REGION 1..17: note = Description of Artificial Sequence: Synthetic peptide
SINWKGNSLAYGDSVKG

SEQ ID NO: 1268 - protein, 17 aa, synthetic construct
  REGION 1..17: note = Description of Artificial Sequence: Synthetic peptide
AISGSGGSTYYADSVKG

SEQ ID NO: 1269 - protein, 17 aa, synthetic construct
  REGION 1..17: note = Description of Artificial Sequence: Synthetic peptide
AISGSGGSTYYADSVKG

SEQ ID NO: 1270 - protein, 17 aa, synthetic construct
  REGION 1..17: note = Description of Artificial Sequence: Synthetic peptide
AISGSGGSTYYADSVKG

SEQ ID NO: 1271 - protein, 17 aa, synthetic construct
  REGION 1..17: note = Description of Artificial Sequence: Synthetic peptide
AISGSGGSTYYADSVKG

SEQ ID NO: 1272 - protein, 17 aa, synthetic construct
  REGION 1..17: note = Description of Artificial Sequence: Synthetic peptide
AISGSGGSTYYADSVKG

SEQ ID NO: 1273 - protein, 17 aa, synthetic construct
  REGION 1..17: note = Description of Artificial Sequence: Synthetic peptide
AISGSGGSTYYADSVKG

SEQ ID NO: 1274 - protein, 17 aa, synthetic construct
  REGION 1..17: note = Description of Artificial Sequence: Synthetic peptide
AISGSGGSTYYADSVKG

SEQ ID NO: 1275 - protein, 17 aa, synthetic construct
  REGION 1..17: note = Description of Artificial Sequence: Synthetic peptide
WINTYTGESYFADDFKG

SEQ ID NO: 1276 - protein, 17 aa, synthetic construct
  REGION 1..17: note = Description of Artificial Sequence: Synthetic peptide
WINTETREPAYAYDFRG

SEQ ID NO: 1277 - protein, 17 aa, synthetic construct
  REGION 1..17: note = Description of Artificial Sequence: Synthetic peptide
RINTESGVPIYADDFKG

SEQ ID NO: 1278 - protein, 17 aa, synthetic construct
  REGION 1..17: note = Description of Artificial Sequence: Synthetic peptide
RINTETGEPLYADDFKG

SEQ ID NO: 1279 - protein, 7 aa, synthetic construct
  REGION 1..7: note = Description of Artificial Sequence: Synthetic peptide
HGGESDV

SEQ ID NO: 1280 - protein, 11 aa, synthetic construct
  REGION 1..11: note = Description of Artificial Sequence: Synthetic peptide
SPAHYYGGMDV

SEQ ID NO: 1281 - protein, 6 aa, synthetic construct
  REGION 1..6: note = Description of Artificial Sequence: Synthetic peptide
HSFLAY

SEQ ID NO: 1282 - protein, 7 aa, synthetic construct
  REGION 1..7: note = Description of Artificial Sequence: Synthetic peptide
HGGESDV

SEQ ID NO: 1283 - protein, 11 aa, synthetic construct
  REGION 1..11: note = Description of Artificial Sequence: Synthetic peptide
GPYYYQSYMDV

SEQ ID NO: 1284 - protein, 14 aa, synthetic construct
  REGION 1..14: note = Description of Artificial Sequence: Synthetic peptide
LDSSGYYYARGPRY

SEQ ID NO: 1285 - protein, 9 aa, synthetic construct
  REGION 1..9: note = Description of Artificial Sequence: Synthetic peptide
GPYYYYMDV

SEQ ID NO: 1286 - protein, 7 aa, synthetic construct
  REGION 1..7: note = Description of Artificial Sequence: Synthetic peptide
HGGESDV

SEQ ID NO: 1287 - protein, 7 aa, synthetic construct
  REGION 1..7: note = Description of Artificial Sequence: Synthetic peptide
HGGESDV

SEQ ID NO: 1288 - protein, 7 aa, synthetic construct
  REGION 1..7: note = Description of Artificial Sequence: Synthetic peptide
HGGESDV

SEQ ID NO: 1289 - protein, 8 aa, synthetic construct
  REGION 1..8: note = Description of Artificial Sequence: Synthetic peptide
ESGDGMDV

SEQ ID NO: 1290 - protein, 8 aa, synthetic construct
  REGION 1..8: note = Description of Artificial Sequence: Synthetic peptide
STMVREDY

SEQ ID NO: 1291 - protein, 7 aa, synthetic construct
  REGION 1..7: note = Description of Artificial Sequence: Synthetic peptide
HGGESDV

SEQ ID NO: 1292 - protein, 7 aa, synthetic construct
  REGION 1..7: note = Description of Artificial Sequence: Synthetic peptide
HGGESDV

SEQ ID NO: 1293 - protein, 7 aa, synthetic construct
  REGION 1..7: note = Description of Artificial Sequence: Synthetic peptide
HGGESDV

SEQ ID NO: 1294 - protein, 11 aa, synthetic construct
  REGION 1..11: note = Description of Artificial Sequence: Synthetic peptide
HWQEWPDAFDI

SEQ ID NO: 1295 - protein, 13 aa, synthetic construct
  REGION 1..13: note = Description of Artificial Sequence: Synthetic peptide
SGAGGTSATAFDI

SEQ ID NO: 1296 - protein, 10 aa, synthetic construct
  REGION 1..10: note = Description of Artificial Sequence: Synthetic peptide
TIAAVYAFDI

SEQ ID NO: 1297 - protein, 8 aa, synthetic construct
  REGION 1..8: note = Description of Artificial Sequence: Synthetic peptide
DLRGAFDI

SEQ ID NO: 1298 - protein, 11 aa, synthetic construct
  REGION 1..11: note = Description of Artificial Sequence: Synthetic peptide
EGSGSGWYFDF

SEQ ID NO: 1299 - protein, 13 aa, synthetic construct
  REGION 1..13: note = Description of Artificial Sequence: Synthetic peptide
AGIAARLRGAFDI

SEQ ID NO: 1300 - protein, 20 aa, synthetic construct
  REGION 1..20: note = Description of Artificial Sequence: Synthetic peptide
RGGYQLLRWDVGLLRSAFDI

SEQ ID NO: 1301 - protein, 13 aa, synthetic construct
  REGION 1..13: note = Description of Artificial Sequence: Synthetic peptide
SSPEGLFLYWFDP

SEQ ID NO: 1302 - protein, 9 aa, synthetic construct
  REGION 1..9: note = Description of Artificial Sequence: Synthetic peptide
VEGSGSLDY

SEQ ID NO: 1303 - protein, 9 aa, synthetic construct
  REGION 1..9: note = Description of Artificial Sequence: Synthetic peptide
RAGSEASDI

SEQ ID NO: 1304 - protein, 15 aa, synthetic construct
  REGION 1..15: note = Description of Artificial Sequence: Synthetic peptide
ATYKRELRYYYGMDV

SEQ ID NO: 1305 - protein, 15 aa, synthetic construct
  REGION 1..15: note = Description of Artificial Sequence: Synthetic peptide
ATYKRELRYYYGMDV

SEQ ID NO: 1306 - protein, 8 aa, synthetic construct
  REGION 1..8: note = Description of Artificial Sequence: Synthetic peptide
VGKAVPDV

SEQ ID NO: 1307 - protein, 13 aa, synthetic construct
  REGION 1..13: note = Description of Artificial Sequence: Synthetic peptide
HQGVAYYNYAMDV

SEQ ID NO: 1308 - protein, 8 aa, synthetic construct
  REGION 1..8: note = Description of Artificial Sequence: Synthetic peptide
VVRDGMDV

SEQ ID NO: 1309 - protein, 9 aa, synthetic construct
  REGION 1..9: note = Description of Artificial Sequence: Synthetic peptide
IPQTGTFDY

SEQ ID NO: 1310 - protein, 15 aa, synthetic construct
  REGION 1..15: note = Description of Artificial Sequence: Synthetic peptide
ANYKRELRYYYGMDV

SEQ ID NO: 1311 - protein, 11 aa, synthetic construct
  REGION 1..11: note = Description of Artificial Sequence: Synthetic peptide
ALVGATGAFDI

SEQ ID NO: 1312 - protein, 8 aa, synthetic construct
  REGION 1..8: note = Description of Artificial Sequence: Synthetic peptide
WFGEGFDP

SEQ ID NO: 1313 - protein, 17 aa, synthetic construct
  REGION 1..17: note = Description of Artificial Sequence: Synthetic peptide
VGYDSSGYYRDYYGMDV

SEQ ID NO: 1314 - protein, 13 aa, synthetic construct
  REGION 1..13: note = Description of Artificial Sequence: Synthetic peptide
MGWSSGYLGAFDI

SEQ ID NO: 1315 - protein, 13 aa, synthetic construct
  REGION 1..13: note = Description of Artificial Sequence: Synthetic peptide
GEIYYGYDGGFAY

SEQ ID NO: 1316 - protein, 8 aa, synthetic construct
  REGION 1..8: note = Description of Artificial Sequence: Synthetic peptide
DYSYAMDY

SEQ ID NO: 1317 - protein, 8 aa, synthetic construct
  REGION 1..8: note = Description of Artificial Sequence: Synthetic peptide
DYLYSLDF

SEQ ID NO: 1318 - protein, 8 aa, synthetic construct
  REGION 1..8: note = Description of Artificial Sequence: Synthetic peptide
DYLYSCDY

SEQ ID NO: 1319 - protein, 11 aa, synthetic construct
  REGION 1..11: note = Description of Artificial Sequence: Synthetic peptide
RASQSISSYLN

SEQ ID NO: 1320 - protein, 12 aa, synthetic construct
  REGION 1..12: note = Description of Artificial Sequence: Synthetic peptide
RASQSISSSFLA

SEQ ID NO: 1321 - protein, 16 aa, synthetic construct
  REGION 1..16: note = Description of Artificial Sequence: Synthetic peptide
RSSQSLLHSNGYNYLD

SEQ ID NO: 1322 - protein, 16 aa, synthetic construct
  REGION 1..16: note = Description of Artificial Sequence: Synthetic peptide
KSSQSLLRNDGKTPLY

SEQ ID NO: 1323 - protein, 16 aa, synthetic construct
  REGION 1..16: note = Description of Artificial Sequence: Synthetic peptide
RSSQSLLHSNGYNYLN

SEQ ID NO: 1324 - protein, 11 aa, synthetic construct
  REGION 1..11: note = Description of Artificial Sequence: Synthetic peptide
RASQSISSYLN

SEQ ID NO: 1325 - protein, 16 aa, synthetic construct
  REGION 1..16: note = Description of Artificial Sequence: Synthetic peptide
RSSQSLLYSNGYNYVD

SEQ ID NO: 1326 - protein, 11 aa, synthetic construct
  REGION 1..11: note = Description of Artificial Sequence: Synthetic peptide
RASQSVSSNLA

SEQ ID NO: 1327 - protein, 11 aa, synthetic construct
  REGION 1..11: note = Description of Artificial Sequence: Synthetic peptide
RASQSVSSKLA

SEQ ID NO: 1328 - protein, 12 aa, synthetic construct
  REGION 1..12: note = Description of Artificial Sequence: Synthetic peptide
RASQSVGSTNLA

SEQ ID NO: 1329 - protein, 11 aa, synthetic construct
  REGION 1..11: note = Description of Artificial Sequence: Synthetic peptide
RASQSISSYLN

SEQ ID NO: 1330 - protein, 16 aa, synthetic construct
  REGION 1..16: note = Description of Artificial Sequence: Synthetic peptide
KSSESLVHNSGKTYLN

SEQ ID NO: 1331 - protein, 11 aa, synthetic construct
  REGION 1..11: note = Description of Artificial Sequence: Synthetic peptide
QASEDINKFLN

SEQ ID NO: 1332 - protein, 11 aa, synthetic construct
  REGION 1..11: note = Description of Artificial Sequence: Synthetic peptide
RASQSVGSNLA

SEQ ID NO: 1333 - protein, 12 aa, synthetic construct
  REGION 1..12: note = Description of Artificial Sequence: Synthetic peptide
RASQSIGSSSLA

SEQ ID NO: 1334 - protein, 11 aa, synthetic construct
  REGION 1..11: note = Description of Artificial Sequence: Synthetic peptide
KASQDIDDAMN

SEQ ID NO: 1335 - protein, 11 aa, synthetic construct
  REGION 1..11: note = Description of Artificial Sequence: Synthetic peptide
RASQDIYNNLA

SEQ ID NO: 1336 - protein, 16 aa, synthetic construct
  REGION 1..16: note = Description of Artificial Sequence: Synthetic peptide
RSSQSLLHSNGYNYLD

SEQ ID NO: 1337 - protein, 11 aa, synthetic construct
  REGION 1..11: note = Description of Artificial Sequence: Synthetic peptide
GGNNIGTKSVH

SEQ ID NO: 1338 - protein, 11 aa, synthetic construct
  REGION 1..11: note = Description of Artificial Sequence: Synthetic peptide
SGDGLSKKYVS

SEQ ID NO: 1339 - protein, 11 aa, synthetic construct
  REGION 1..11: note = Description of Artificial Sequence: Synthetic peptide
RASQGIRNWLA

SEQ ID NO: 1340 - protein, 11 aa, synthetic construct
  REGION 1..11: note = Description of Artificial Sequence: Synthetic peptide
GGNNIGSKSVH

SEQ ID NO: 1341 - protein, 11 aa, synthetic construct
  REGION 1..11: note = Description of Artificial Sequence: Synthetic peptide
QGDSLGNYYAT

SEQ ID NO: 1342 - protein, 12 aa, synthetic construct
  REGION 1..12: note = Description of Artificial Sequence: Synthetic peptide
RASQSVSSAYLA

SEQ ID NO: 1343 - protein, 11 aa, synthetic construct
  REGION 1..11: note = Description of Artificial Sequence: Synthetic peptide
RASQSVSNSLA

SEQ ID NO: 1344 - protein, 12 aa, synthetic construct
  REGION 1..12: note = Description of Artificial Sequence: Synthetic peptide
RASQSVSSSFLA

SEQ ID NO: 1345 - protein, 12 aa, synthetic construct
  REGION 1..12: note = Description of Artificial Sequence: Synthetic peptide
RASQSVSTTFLA

SEQ ID NO: 1346 - protein, 11 aa, synthetic construct
  REGION 1..11: note = Description of Artificial Sequence: Synthetic peptide
RASQSISSYLN

SEQ ID NO: 1347 - protein, 12 aa, synthetic construct
  REGION 1..12: note = Description of Artificial Sequence: Synthetic peptide
RATQSIGSSFLA

SEQ ID NO: 1348 - protein, 12 aa, synthetic construct
  REGION 1..12: note = Description of Artificial Sequence: Synthetic peptide
RASQSVSSSYLA

SEQ ID NO: 1349 - protein, 12 aa, synthetic construct
  REGION 1..12: note = Description of Artificial Sequence: Synthetic peptide
RASQSVSSSYLA

SEQ ID NO: 1350 - protein, 12 aa, synthetic construct
  REGION 1..12: note = Description of Artificial Sequence: Synthetic peptide
RASQRVASNYLA

SEQ ID NO: 1351 - protein, 12 aa, synthetic construct
  REGION 1..12: note = Description of Artificial Sequence: Synthetic peptide
RASQSLSSNFLA

SEQ ID NO: 1352 - protein, 16 aa, synthetic construct
  REGION 1..16: note = Description of Artificial Sequence: Synthetic peptide
RSSQSLLHSNGYNYLD

SEQ ID NO: 1353 - protein, 12 aa, synthetic construct
  REGION 1..12: note = Description of Artificial Sequence: Synthetic peptide
RASQSVSSSYLA

SEQ ID NO: 1354 - protein, 12 aa, synthetic construct
  REGION 1..12: note = Description of Artificial Sequence: Synthetic peptide
RASQSVASSFLA

SEQ ID NO: 1355 - protein, 11 aa, synthetic construct
  REGION 1..11: note = Description of Artificial Sequence: Synthetic peptide
RASQDVNTAVS

SEQ ID NO: 1356 - protein, 15 aa, synthetic construct
  REGION 1..15: note = Description of Artificial Sequence: Synthetic peptide
RASESVSVIGAHLIH

SEQ ID NO: 1357 - protein, 15 aa, synthetic construct
  REGION 1..15: note = Description of Artificial Sequence: Synthetic peptide
RASESVTILGSHLIY

SEQ ID NO: 1358 - protein, 15 aa, synthetic construct
  REGION 1..15: note = Description of Artificial Sequence: Synthetic peptide
RASESVTILGSHLIY

SEQ ID NO: 1359 - protein, 7 aa, synthetic construct
  REGION 1..7: note = Description of Artificial Sequence: Synthetic peptide
AASSLQS

SEQ ID NO: 1360 - protein, 7 aa, synthetic construct
  REGION 1..7: note = Description of Artificial Sequence: Synthetic peptide
GASRRAT

SEQ ID NO: 1361 - protein, 7 aa, synthetic construct
  REGION 1..7: note = Description of Artificial Sequence: Synthetic peptide
LGSNRAS

SEQ ID NO: 1362 - protein, 7 aa, synthetic construct
  REGION 1..7: note = Description of Artificial Sequence: Synthetic peptide
EVSNRFS

SEQ ID NO: 1363 - protein, 7 aa, synthetic construct
  REGION 1..7: note = Description of Artificial Sequence: Synthetic peptide
LGSKRAS

SEQ ID NO: 1364 - protein, 7 aa, synthetic construct
  REGION 1..7: note = Description of Artificial Sequence: Synthetic peptide
GASTLAS

SEQ ID NO: 1365 - protein, 7 aa, synthetic construct
  REGION 1..7: note = Description of Artificial Sequence: Synthetic peptide
LGSNRAS

SEQ ID NO: 1366 - protein, 7 aa, synthetic construct
  REGION 1..7: note = Description of Artificial Sequence: Synthetic peptide
GASTRAS

SEQ ID NO: 1367 - protein, 7 aa, synthetic construct
  REGION 1..7: note = Description of Artificial Sequence: Synthetic peptide
GASIRAT

SEQ ID NO: 1368 - protein, 7 aa, synthetic construct
  REGION 1..7: note = Description of Artificial Sequence: Synthetic peptide
DASNRAT

SEQ ID NO: 1369 - protein, 7 aa, synthetic construct
  REGION 1..7: note = Description of Artificial Sequence: Synthetic peptide
AASSLQS

SEQ ID NO: 1370 - protein, 7 aa, synthetic construct
  REGION 1..7: note = Description of Artificial Sequence: Synthetic peptide
EVSNRDS

SEQ ID NO: 1371 - protein, 7 aa, synthetic construct
  REGION 1..7: note = Description of Artificial Sequence: Synthetic peptide
DASTLQT

SEQ ID NO: 1372 - protein, 7 aa, synthetic construct
  REGION 1..7: note = Description of Artificial Sequence: Synthetic peptide
GASTRAT

SEQ ID NO: 1373 - protein, 7 aa, synthetic construct
  REGION 1..7: note = Description of Artificial Sequence: Synthetic peptide
GASSRAS

SEQ ID NO: 1374 - protein, 7 aa, synthetic construct
  REGION 1..7: note = Description of Artificial Sequence: Synthetic peptide
SATSPVP

SEQ ID NO: 1375 - protein, 7 aa, synthetic construct
  REGION 1..7: note = Description of Artificial Sequence: Synthetic peptide
AANKSQS

SEQ ID NO: 1376 - protein, 7 aa, synthetic construct
  REGION 1..7: note = Description of Artificial Sequence: Synthetic peptide
LGSNRAS

SEQ ID NO: 1377 - protein, 7 aa, synthetic construct
  REGION 1..7: note = Description of Artificial Sequence: Synthetic peptide
DDSVRPS

SEQ ID NO: 1378 - protein, 7 aa, synthetic construct
  REGION 1..7: note = Description of Artificial Sequence: Synthetic peptide
RDKERPS

SEQ ID NO: 1379 - protein, 7 aa, synthetic construct
  REGION 1..7: note = Description of Artificial Sequence: Synthetic peptide
AASNLQS

SEQ ID NO: 1380 - protein, 7 aa, synthetic construct
  REGION 1..7: note = Description of Artificial Sequence: Synthetic peptide
GKNNRPS

SEQ ID NO: 1381 - protein, 7 aa, synthetic construct
  REGION 1..7: note = Description of Artificial Sequence: Synthetic peptide
GTNNRPS

SEQ ID NO: 1382 - protein, 7 aa, synthetic construct
  REGION 1..7: note = Description of Artificial Sequence: Synthetic peptide
GASTRAT

SEQ ID NO: 1383 - protein, 7 aa, synthetic construct
  REGION 1..7: note = Description of Artificial Sequence: Synthetic peptide
DASSRAT

SEQ ID NO: 1384 - protein, 7 aa, synthetic construct
  REGION 1..7: note = Description of Artificial Sequence: Synthetic peptide
GASSRAT

SEQ ID NO: 1385 - protein, 7 aa, synthetic construct
  REGION 1..7: note = Description of Artificial Sequence: Synthetic peptide
GSSNRAT

SEQ ID NO: 1386 - protein, 7 aa, synthetic construct
  REGION 1..7: note = Description of Artificial Sequence: Synthetic peptide
AASSLQS

SEQ ID NO: 1387 - protein, 7 aa, synthetic construct
  REGION 1..7: note = Description of Artificial Sequence: Synthetic peptide
GASQRAT

SEQ ID NO: 1388 - protein, 7 aa, synthetic construct
  REGION 1..7: note = Description of Artificial Sequence: Synthetic peptide
GASSRAT

SEQ ID NO: 1389 - protein, 7 aa, synthetic construct
  REGION 1..7: note = Description of Artificial Sequence: Synthetic peptide
GASSRAT

SEQ ID NO: 1390 - protein, 7 aa, synthetic construct
  REGION 1..7: note = Description of Artificial Sequence: Synthetic peptide
GASSRAT

SEQ ID NO: 1391 - protein, 7 aa, synthetic construct
  REGION 1..7: note = Description of Artificial Sequence: Synthetic peptide
GASNWAT

SEQ ID NO: 1392 - protein, 7 aa, synthetic construct
  REGION 1..7: note = Description of Artificial Sequence: Synthetic peptide
LGSNRAS

SEQ ID NO: 1393 - protein, 7 aa, synthetic construct
  REGION 1..7: note = Description of Artificial Sequence: Synthetic peptide
GTSSRAT

SEQ ID NO: 1394 - protein, 7 aa, synthetic construct
  REGION 1..7: note = Description of Artificial Sequence: Synthetic peptide
GASGRAT

SEQ ID NO: 1395 - protein, 7 aa, synthetic construct
  REGION 1..7: note = Description of Artificial Sequence: Synthetic peptide
SASYRYT

SEQ ID NO: 1396 - protein, 7 aa, synthetic construct
  REGION 1..7: note = Description of Artificial Sequence: Synthetic peptide
LASNLET

SEQ ID NO: 1397 - protein, 7 aa, synthetic construct
  REGION 1..7: note = Description of Artificial Sequence: Synthetic peptide
LASNVQT

SEQ ID NO: 1398 - protein, 7 aa, synthetic construct
  REGION 1..7: note = Description of Artificial Sequence: Synthetic peptide
LASNVQT

SEQ ID NO: 1399 - protein, 9 aa, synthetic construct
  REGION 1..9: note = Description of Artificial Sequence: Synthetic peptide
QQSYSTPYT

SEQ ID NO: 1400 - protein, 10 aa, synthetic construct
  REGION 1..10: note = Description of Artificial Sequence: Synthetic peptide
QQYHSSPSWT

SEQ ID NO: 1401 - protein, 9 aa, synthetic construct
  REGION 1..9: note = Description of Artificial Sequence: Synthetic peptide
MQALQTPYT

SEQ ID NO: 1402 - protein, 8 aa, synthetic construct
  REGION 1..8: note = Description of Artificial Sequence: Synthetic peptide
MQNIQFPS

SEQ ID NO: 1403 - protein, 9 aa, synthetic construct
  REGION 1..9: note = Description of Artificial Sequence: Synthetic peptide
MQALQTPYT

SEQ ID NO: 1404 - protein, 8 aa, synthetic construct
  REGION 1..8: note = Description of Artificial Sequence: Synthetic peptide
QQSYKRAS

SEQ ID NO: 1405 - protein, 9 aa, synthetic construct
  REGION 1..9: note = Description of Artificial Sequence: Synthetic peptide
MQGRQFPYS

SEQ ID NO: 1406 - protein, 8 aa, synthetic construct
  REGION 1..8: note = Description of Artificial Sequence: Synthetic peptide
QQYGSSLT

SEQ ID NO: 1407 - protein, 9 aa, synthetic construct
  REGION 1..9: note = Description of Artificial Sequence: Synthetic peptide
QQYGSSSWT

SEQ ID NO: 1408 - protein, 10 aa, synthetic construct
  REGION 1..10: note = Description of Artificial Sequence: Synthetic peptide
QQYGSSPPWT

SEQ ID NO: 1409 - protein, 7 aa, synthetic construct
  REGION 1..7: note = Description of Artificial Sequence: Synthetic peptide
QQSYTLA

SEQ ID NO: 1410 - protein, 9 aa, synthetic construct
  REGION 1..9: note = Description of Artificial Sequence: Synthetic peptide
MQGTHWPGT

SEQ ID NO: 1411 - protein, 9 aa, synthetic construct
  REGION 1..9: note = Description of Artificial Sequence: Synthetic peptide
QQYESLPLT

SEQ ID NO: 1412 - protein, 10 aa, synthetic construct
  REGION 1..10: note = Description of Artificial Sequence: Synthetic peptide
QQYNDWLPVT

SEQ ID NO: 1413 - protein, 10 aa, synthetic construct
  REGION 1..10: note = Description of Artificial Sequence: Synthetic peptide
QQYAGSPPFT

SEQ ID NO: 1414 - protein, 9 aa, synthetic construct
  REGION 1..9: note = Description of Artificial Sequence: Synthetic peptide
LQHDNFPLT

SEQ ID NO: 1415 - protein, 9 aa, synthetic construct
  REGION 1..9: note = Description of Artificial Sequence: Synthetic peptide
QHYYRFPYS

SEQ ID NO: 1416 - protein, 9 aa, synthetic construct
  REGION 1..9: note = Description of Artificial Sequence: Synthetic peptide
MQALQTPYT

SEQ ID NO: 1417 - protein, 11 aa, synthetic construct
  REGION 1..11: note = Description of Artificial Sequence: Synthetic peptide
QVWDSDSEHVV

SEQ ID NO: 1418 - protein, 9 aa, synthetic construct
  REGION 1..9: note = Description of Artificial Sequence: Synthetic peptide
QAWDDTTVV

SEQ ID NO: 1419 - protein, 9 aa, synthetic construct
  REGION 1..9: note = Description of Artificial Sequence: Synthetic peptide
QKYNSAPFT

SEQ ID NO: 1420 - protein, 12 aa, synthetic construct
  REGION 1..12: note = Description of Artificial Sequence: Synthetic peptide
SSRDSSGDHLRV

SEQ ID NO: 1421 - protein, 11 aa, synthetic construct
  REGION 1..11: note = Description of Artificial Sequence: Synthetic peptide
NSRDSSGHHLL

SEQ ID NO: 1422 - protein, 14 aa, synthetic construct
  REGION 1..14: note = Description of Artificial Sequence: Synthetic peptide
QHYGSSFNGSSLFT

SEQ ID NO: 1423 - protein, 10 aa, synthetic construct
  REGION 1..10: note = Description of Artificial Sequence: Synthetic peptide
QQFGTSSGLT

SEQ ID NO: 1424 - protein, 10 aa, synthetic construct
  REGION 1..10: note = Description of Artificial Sequence: Synthetic peptide
QQYHSSPSWT

SEQ ID NO: 1425 - protein, 10 aa, synthetic construct
  REGION 1..10: note = Description of Artificial Sequence: Synthetic peptide
QQYHSSPSWT

SEQ ID NO: 1426 - protein, 9 aa, synthetic construct
  REGION 1..9: note = Description of Artificial Sequence: Synthetic peptide
QQSYSTPYS

SEQ ID NO: 1427 - protein, 10 aa, synthetic construct
  REGION 1..10: note = Description of Artificial Sequence: Synthetic peptide
QHYESSPSWT

SEQ ID NO: 1428 - protein, 10 aa, synthetic construct
  REGION 1..10: note = Description of Artificial Sequence: Synthetic peptide
QQYGSPPRFT

SEQ ID NO: 1429 - protein, 10 aa, synthetic construct
  REGION 1..10: note = Description of Artificial Sequence: Synthetic peptide
QHYGSSPSWT

SEQ ID NO: 1430 - protein, 10 aa, synthetic construct
  REGION 1..10: note = Description of Artificial Sequence: Synthetic peptide
QHYDSSPSWT

SEQ ID NO: 1431 - protein, 10 aa, synthetic construct
  REGION 1..10: note = Description of Artificial Sequence: Synthetic peptide
QYYGTSPMYT

SEQ ID NO: 1432 - protein, 9 aa, synthetic construct
  REGION 1..9: note = Description of Artificial Sequence: Synthetic peptide
MQALQTPLT

SEQ ID NO: 1433 - protein, 11 aa, synthetic construct
  REGION 1..11: note = Description of Artificial Sequence: Synthetic peptide
QHYGNSPPKFT

SEQ ID NO: 1434 - protein, 10 aa, synthetic construct
  REGION 1..10: note = Description of Artificial Sequence: Synthetic peptide
QHYGGSPRLT

SEQ ID NO: 1435 - protein, 9 aa, synthetic construct
  REGION 1..9: note = Description of Artificial Sequence: Synthetic peptide
QQHYSTPWT

SEQ ID NO: 1436 - protein, 9 aa, synthetic construct
  REGION 1..9: note = Description of Artificial Sequence: Synthetic peptide
LQSRIFPRT

SEQ ID NO: 1437 - protein, 9 aa, synthetic construct
  REGION 1..9: note = Description of Artificial Sequence: Synthetic peptide
LQSRTIPRT

SEQ ID NO: 1438 - protein, 9 aa, synthetic construct
  REGION 1..9: note = Description of Artificial Sequence: Synthetic peptide
LQSRTIPRT

SEQ ID NO: 1439 - protein, 7 aa, synthetic construct
  REGION 1..7: note = Description of Artificial Sequence: Synthetic peptide
GFALSNH

SEQ ID NO: 1440 - protein, 7 aa, synthetic construct
  REGION 1..7: note = Description of Artificial Sequence: Synthetic peptide
GFTFSNY

SEQ ID NO: 1441 - protein, 7 aa, synthetic construct
  REGION 1..7: note = Description of Artificial Sequence: Synthetic peptide
GFTFDDY

SEQ ID NO: 1442 - protein, 7 aa, synthetic construct
  REGION 1..7: note = Description of Artificial Sequence: Synthetic peptide
GFALSNH

SEQ ID NO: 1443 - protein, 7 aa, synthetic construct
  REGION 1..7: note = Description of Artificial Sequence: Synthetic peptide
GYIFDNF

SEQ ID NO: 1444 - protein, 7 aa, synthetic construct
  REGION 1..7: note = Description of Artificial Sequence: Synthetic peptide
GFTFSSD

SEQ ID NO: 1445 - protein, 7 aa, synthetic construct
  REGION 1..7: note = Description of Artificial Sequence: Synthetic peptide
GYTFSNY

SEQ ID NO: 1446 - protein, 7 aa, synthetic construct
  REGION 1..7: note = Description of Artificial Sequence: Synthetic peptide
GFALSNH

SEQ ID NO: 1447 - protein, 7 aa, synthetic construct
  REGION 1..7: note = Description of Artificial Sequence: Synthetic peptide
GFALSNH

SEQ ID NO: 1448 - protein, 7 aa, synthetic construct
  REGION 1..7: note = Description of Artificial Sequence: Synthetic peptide
GFALSNH

SEQ ID NO: 1449 - protein, 7 aa, synthetic construct
  REGION 1..7: note = Description of Artificial Sequence: Synthetic peptide
GFTFSDY

SEQ ID NO: 1450 - protein, 7 aa, synthetic construct
  REGION 1..7: note = Description of Artificial Sequence: Synthetic peptide
GFTFSDY

SEQ ID NO: 1451 - protein, 7 aa, synthetic construct
  REGION 1..7: note = Description of Artificial Sequence: Synthetic peptide
GFALSNH

SEQ ID NO: 1452 - protein, 7 aa, synthetic construct
  REGION 1..7: note = Description of Artificial Sequence: Synthetic peptide
GFALSNH

SEQ ID NO: 1453 - protein, 7 aa, synthetic construct
  REGION 1..7: note = Description of Artificial Sequence: Synthetic peptide
GFALSNH

SEQ ID NO: 1454 - protein, 9 aa, synthetic construct
  REGION 1..9: note = Description of Artificial Sequence: Synthetic peptide
GGSISSSYY

SEQ ID NO: 1455 - protein, 9 aa, synthetic construct
  REGION 1..9: note = Description of Artificial Sequence: Synthetic peptide
GFSLRTSGM

SEQ ID NO: 1456 - protein, 7 aa, synthetic construct
  REGION 1..7: note = Description of Artificial Sequence: Synthetic peptide
GFTFSSY

SEQ ID NO: 1457 - protein, 7 aa, synthetic construct
  REGION 1..7: note = Description of Artificial Sequence: Synthetic peptide
GFTFSDY

SEQ ID NO: 1458 - protein, 7 aa, synthetic construct
  REGION 1..7: note = Description of Artificial Sequence: Synthetic peptide
GYTVTSH

SEQ ID NO: 1459 - protein, 9 aa, synthetic construct
  REGION 1..9: note = Description of Artificial Sequence: Synthetic peptide
GGSISSGGY

SEQ ID NO: 1460 - protein, 7 aa, synthetic construct
  REGION 1..7: note = Description of Artificial Sequence: Synthetic peptide
GGTFSSY

SEQ ID NO: 1461 - protein, 9 aa, synthetic construct
  REGION 1..9: note = Description of Artificial Sequence: Synthetic peptide
GDSVSSNSA

SEQ ID NO: 1462 - protein, 7 aa, synthetic construct
  REGION 1..7: note = Description of Artificial Sequence: Synthetic peptide
GFTFSSY

SEQ ID NO: 1463 - protein, 7 aa, synthetic construct
  REGION 1..7: note = Description of Artificial Sequence: Synthetic peptide
GITFSRY

SEQ ID NO: 1464 - protein, 7 aa, synthetic construct
  REGION 1..7: note = Description of Artificial Sequence: Synthetic peptide
GFTFSSY

SEQ ID NO: 1465 - protein, 7 aa, synthetic construct
  REGION 1..7: note = Description of Artificial Sequence: Synthetic peptide
GFTFSSY

SEQ ID NO: 1466 - protein, 7 aa, synthetic construct
  REGION 1..7: note = Description of Artificial Sequence: Synthetic peptide
GFTFDDY

SEQ ID NO: 1467 - protein, 7 aa, synthetic construct
  REGION 1..7: note = Description of Artificial Sequence: Synthetic peptide
GFTFDDY

SEQ ID NO: 1468 - protein, 7 aa, synthetic construct
  REGION 1..7: note = Description of Artificial Sequence: Synthetic peptide
GFTFSSY

SEQ ID NO: 1469 - protein, 7 aa, synthetic construct
  REGION 1..7: note = Description of Artificial Sequence: Synthetic peptide
GFTFSSY

SEQ ID NO: 1470 - protein, 7 aa, synthetic construct
  REGION 1..7: note = Description of Artificial Sequence: Synthetic peptide
GFTFSSY

SEQ ID NO: 1471 - protein, 7 aa, synthetic construct
  REGION 1..7: note = Description of Artificial Sequence: Synthetic peptide
GFSFSSY

SEQ ID NO: 1472 - protein, 7 aa, synthetic construct
  REGION 1..7: note = Description of Artificial Sequence: Synthetic peptide
GFTFSSY

SEQ ID NO: 1473 - protein, 7 aa, synthetic construct
  REGION 1..7: note = Description of Artificial Sequence: Synthetic peptide
GFTFSSY

SEQ ID NO: 1474 - protein, 7 aa, synthetic construct
  REGION 1..7: note = Description of Artificial Sequence: Synthetic peptide
GFTFSSY

SEQ ID NO: 1475 - protein, 7 aa, synthetic construct
  REGION 1..7: note = Description of Artificial Sequence: Synthetic peptide
GYTFTNF

SEQ ID NO: 1476 - protein, 7 aa, synthetic construct
  REGION 1..7: note = Description of Artificial Sequence: Synthetic peptide
GYTFTDY

SEQ ID NO: 1477 - protein, 7 aa, synthetic construct
  REGION 1..7: note = Description of Artificial Sequence: Synthetic peptide
GYTFRHY

SEQ ID NO: 1478 - protein, 7 aa, synthetic construct
  REGION 1..7: note = Description of Artificial Sequence: Synthetic peptide
GYTFTHY

SEQ ID NO: 1479 - protein, 5 aa, synthetic construct
  REGION 1..5: note = Description of Artificial Sequence: Synthetic peptide
VYSGS

SEQ ID NO: 1480 - protein, 6 aa, synthetic construct
  REGION 1..6: note = Description of Artificial Sequence: Synthetic peptide
SRSGEN

SEQ ID NO: 1481 - protein, 6 aa, synthetic construct
  REGION 1..6: note = Description of Artificial Sequence: Synthetic peptide
SWNSGS

SEQ ID NO: 1482 - protein, 5 aa, synthetic construct
  REGION 1..5: note = Description of Artificial Sequence: Synthetic peptide
VYSGS

SEQ ID NO: 1483 - protein, 6 aa, synthetic construct
  REGION 1..6: note = Description of Artificial Sequence: Synthetic peptide
NPKNNN

SEQ ID NO: 1484 - protein, 6 aa, synthetic construct
  REGION 1..6: note = Description of Artificial Sequence: Synthetic peptide
SGSGGT

SEQ ID NO: 1485 - protein, 6 aa, synthetic construct
  REGION 1..6: note = Description of Artificial Sequence: Synthetic peptide
SAYNGN

SEQ ID NO: 1486 - protein, 5 aa, synthetic construct
  REGION 1..5: note = Description of Artificial Sequence: Synthetic peptide
VYSGS

SEQ ID NO: 1487 - protein, 5 aa, synthetic construct
  REGION 1..5: note = Description of Artificial Sequence: Synthetic peptide
VYSGS

SEQ ID NO: 1488 - protein, 5 aa, synthetic construct
  REGION 1..5: note = Description of Artificial Sequence: Synthetic peptide
VYSGS

SEQ ID NO: 1489 - protein, 6 aa, synthetic construct
  REGION 1..6: note = Description of Artificial Sequence: Synthetic peptide
SSSGST

SEQ ID NO: 1490 - protein, 6 aa, synthetic construct
  REGION 1..6: note = Description of Artificial Sequence: Synthetic peptide
SSSGNT

SEQ ID NO: 1491 - protein, 5 aa, synthetic construct
  REGION 1..5: note = Description of Artificial Sequence: Synthetic peptide
VYSGS

SEQ ID NO: 1492 - protein, 5 aa, synthetic construct
  REGION 1..5: note = Description of Artificial Sequence: Synthetic peptide
VYSGS

SEQ ID NO: 1493 - protein, 5 aa, synthetic construct
  REGION 1..5: note = Description of Artificial Sequence: Synthetic peptide
VYSGS

SEQ ID NO: 1494 - protein, 5 aa, synthetic construct
  REGION 1..5: note = Description of Artificial Sequence: Synthetic peptide
YYSGS

SEQ ID NO: 1495 - protein, 5 aa, synthetic construct
  REGION 1..5: note = Description of Artificial Sequence: Synthetic peptide
DWDED

SEQ ID NO: 1496 - protein, 6 aa, synthetic construct
  REGION 1..6: note = Description of Artificial Sequence: Synthetic peptide
SSSSSY

SEQ ID NO: 1497 - protein, 6 aa, synthetic construct
  REGION 1..6: note = Description of Artificial Sequence: Synthetic peptide
SSSGST

SEQ ID NO: 1498 - protein, 6 aa, synthetic construct
  REGION 1..6: note = Description of Artificial Sequence: Synthetic peptide
NPSGGV

SEQ ID NO: 1499 - protein, 5 aa, synthetic construct
  REGION 1..5: note = Description of Artificial Sequence: Synthetic peptide
YYSGS

SEQ ID NO: 1500 - protein, 6 aa, synthetic construct
  REGION 1..6: note = Description of Artificial Sequence: Synthetic peptide
IPIFGT

SEQ ID NO: 1501 - protein, 7 aa, synthetic construct
  REGION 1..7: note = Description of Artificial Sequence: Synthetic peptide
YYRSKWY

SEQ ID NO: 1502 - protein, 6 aa, synthetic construct
  REGION 1..6: note = Description of Artificial Sequence: Synthetic peptide
SGSGGS

SEQ ID NO: 1503 - protein, 6 aa, synthetic construct
  REGION 1..6: note = Description of Artificial Sequence: Synthetic peptide
SDSGVS

SEQ ID NO: 1504 - protein, 6 aa, synthetic construct
  REGION 1..6: note = Description of Artificial Sequence: Synthetic peptide
SGSGGS

SEQ ID NO: 1505 - protein, 6 aa, synthetic construct
  REGION 1..6: note = Description of Artificial Sequence: Synthetic peptide
SGSGGS

SEQ ID NO: 1506 - protein, 6 aa, synthetic construct
  REGION 1..6: note = Description of Artificial Sequence: Synthetic peptide
SWNSGS

SEQ ID NO: 1507 - protein, 6 aa, synthetic construct
  REGION 1..6: note = Description of Artificial Sequence: Synthetic peptide
NWKGNS

SEQ ID NO: 1508 - protein, 6 aa, synthetic construct
  REGION 1..6: note = Description of Artificial Sequence: Synthetic peptide
SGSGGS

SEQ ID NO: 1509 - protein, 6 aa, synthetic construct
  REGION 1..6: note = Description of Artificial Sequence: Synthetic peptide
SGSGGS

SEQ ID NO: 1510 - protein, 6 aa, synthetic construct
  REGION 1..6: note = Description of Artificial Sequence: Synthetic peptide
SGSGGS

SEQ ID NO: 1511 - protein, 6 aa, synthetic construct
  REGION 1..6: note = Description of Artificial Sequence: Synthetic peptide
SGSGGS

SEQ ID NO: 1512 - protein, 6 aa, synthetic construct
  REGION 1..6: note = Description of Artificial Sequence: Synthetic peptide
SGSGGS

SEQ ID NO: 1513 - protein, 6 aa, synthetic construct
  REGION 1..6: note = Description of Artificial Sequence: Synthetic peptide
SGSGGS

SEQ ID NO: 1514 - protein, 6 aa, synthetic construct
  REGION 1..6: note = Description of Artificial Sequence: Synthetic peptide
SGSGGS

SEQ ID NO: 1515 - protein, 6 aa, synthetic construct
  REGION 1..6: note = Description of Artificial Sequence: Synthetic peptide
NTYTGE

SEQ ID NO: 1516 - protein, 6 aa, synthetic construct
  REGION 1..6: note = Description of Artificial Sequence: Synthetic peptide
NTETRE

SEQ ID NO: 1517 - protein, 6 aa, synthetic construct
  REGION 1..6: note = Description of Artificial Sequence: Synthetic peptide
NTESGV

SEQ ID NO: 1518 - protein, 6 aa, synthetic construct
  REGION 1..6: note = Description of Artificial Sequence: Synthetic peptide
NTETGE

SEQ ID NO: 1519 - protein, 7 aa, synthetic construct
  REGION 1..7: note = Description of Artificial Sequence: Synthetic peptide
HGGESDV

SEQ ID NO: 1520 - protein, 11 aa, synthetic construct
  REGION 1..11: note = Description of Artificial Sequence: Synthetic peptide
SPAHYYGGMDV

SEQ ID NO: 1521 - protein, 6 aa, synthetic construct
  REGION 1..6: note = Description of Artificial Sequence: Synthetic peptide
HSFLAY

SEQ ID NO: 1522 - protein, 7 aa, synthetic construct
  REGION 1..7: note = Description of Artificial Sequence: Synthetic peptide
HGGESDV

SEQ ID NO: 1523 - protein, 11 aa, synthetic construct
  REGION 1..11: note = Description of Artificial Sequence: Synthetic peptide
GPYYYQSYMDV

SEQ ID NO: 1524 - protein, 14 aa, synthetic construct
  REGION 1..14: note = Description of Artificial Sequence: Synthetic peptide
LDSSGYYYARGPRY

SEQ ID NO: 1525 - protein, 9 aa, synthetic construct
  REGION 1..9: note = Description of Artificial Sequence: Synthetic peptide
GPYYYYMDV

SEQ ID NO: 1526 - protein, 7 aa, synthetic construct
  REGION 1..7: note = Description of Artificial Sequence: Synthetic peptide
HGGESDV

SEQ ID NO: 1527 - protein, 7 aa, synthetic construct
  REGION 1..7: note = Description of Artificial Sequence: Synthetic peptide
HGGESDV

SEQ ID NO: 1528 - protein, 7 aa, synthetic construct
  REGION 1..7: note = Description of Artificial Sequence: Synthetic peptide
HGGESDV

SEQ ID NO: 1529 - protein, 8 aa, synthetic construct
  REGION 1..8: note = Description of Artificial Sequence: Synthetic peptide
ESGDGMDV

SEQ ID NO: 1530 - protein, 8 aa, synthetic construct
  REGION 1..8: note = Description of Artificial Sequence: Synthetic peptide
STMVREDY

SEQ ID NO: 1531 - protein, 7 aa, synthetic construct
  REGION 1..7: note = Description of Artificial Sequence: Synthetic peptide
HGGESDV

SEQ ID NO: 1532 - protein, 7 aa, synthetic construct
  REGION 1..7: note = Description of Artificial Sequence: Synthetic peptide
HGGESDV

SEQ ID NO: 1533 - protein, 7 aa, synthetic construct
  REGION 1..7: note = Description of Artificial Sequence: Synthetic peptide
HGGESDV

SEQ ID NO: 1534 - protein, 11 aa, synthetic construct
  REGION 1..11: note = Description of Artificial Sequence: Synthetic peptide
HWQEWPDAFDI

SEQ ID NO: 1535 - protein, 13 aa, synthetic construct
  REGION 1..13: note = Description of Artificial Sequence: Synthetic peptide
SGAGGTSATAFDI

SEQ ID NO: 1536 - protein, 10 aa, synthetic construct
  REGION 1..10: note = Description of Artificial Sequence: Synthetic peptide
TIAAVYAFDI

SEQ ID NO: 1537 - protein, 8 aa, synthetic construct
  REGION 1..8: note = Description of Artificial Sequence: Synthetic peptide
DLRGAFDI

SEQ ID NO: 1538 - protein, 11 aa, synthetic construct
  REGION 1..11: note = Description of Artificial Sequence: Synthetic peptide
EGSGSGWYFDF

SEQ ID NO: 1539 - protein, 13 aa, synthetic construct
  REGION 1..13: note = Description of Artificial Sequence: Synthetic peptide
AGIAARLRGAFDI

SEQ ID NO: 1540 - protein, 20 aa, synthetic construct
  REGION 1..20: note = Description of Artificial Sequence: Synthetic peptide
RGGYQLLRWDVGLLRSAFDI

SEQ ID NO: 1541 - protein, 13 aa, synthetic construct
  REGION 1..13: note = Description of Artificial Sequence: Synthetic peptide
SSPEGLFLYWFDP

SEQ ID NO: 1542 - protein, 9 aa, synthetic construct
  REGION 1..9: note = Description of Artificial Sequence: Synthetic peptide
VEGSGSLDY

SEQ ID NO: 1543 - protein, 9 aa, synthetic construct
  REGION 1..9: note = Description of Artificial Sequence: Synthetic peptide
RAGSEASDI

SEQ ID NO: 1544 - protein, 15 aa, synthetic construct
  REGION 1..15: note = Description of Artificial Sequence: Synthetic peptide
ATYKRELRYYYGMDV

SEQ ID NO: 1545 - protein, 15 aa, synthetic construct
  REGION 1..15: note = Description of Artificial Sequence: Synthetic peptide
ATYKRELRYYYGMDV

SEQ ID NO: 1546 - protein, 8 aa, synthetic construct
  REGION 1..8: note = Description of Artificial Sequence: Synthetic peptide
VGKAVPDV

SEQ ID NO: 1547 - protein, 13 aa, synthetic construct
  REGION 1..13: note = Description of Artificial Sequence: Synthetic peptide
HQGVAYYNYAMDV

SEQ ID NO: 1548 - protein, 8 aa, synthetic construct
  REGION 1..8: note = Description of Artificial Sequence: Synthetic peptide
VVRDGMDV

SEQ ID NO: 1549 - protein, 9 aa, synthetic construct
  REGION 1..9: note = Description of Artificial Sequence: Synthetic peptide
IPQTGTFDY

SEQ ID NO: 1550 - protein, 15 aa, synthetic construct
  REGION 1..15: note = Description of Artificial Sequence: Synthetic peptide
ANYKRELRYYYGMDV

SEQ ID NO: 1551 - protein, 11 aa, synthetic construct
  REGION 1..11: note = Description of Artificial Sequence: Synthetic peptide
ALVGATGAFDI

SEQ ID NO: 1552 - protein, 8 aa, synthetic construct
  REGION 1..8: note = Description of Artificial Sequence: Synthetic peptide
WFGEGFDP

SEQ ID NO: 1553 - protein, 17 aa, synthetic construct
  REGION 1..17: note = Description of Artificial Sequence: Synthetic peptide
VGYDSSGYYRDYYGMDV

SEQ ID NO: 1554 - protein, 13 aa, synthetic construct
  REGION 1..13: note = Description of Artificial Sequence: Synthetic peptide
MGWSSGYLGAFDI

SEQ ID NO: 1555 - protein, 13 aa, synthetic construct
  REGION 1..13: note = Description of Artificial Sequence: Synthetic peptide
GEIYYGYDGGFAY

SEQ ID NO: 1556 - protein, 8 aa, synthetic construct
  REGION 1..8: note = Description of Artificial Sequence: Synthetic peptide
DYSYAMDY

SEQ ID NO: 1557 - protein, 8 aa, synthetic construct
  REGION 1..8: note = Description of Artificial Sequence: Synthetic peptide
DYLYSLDF

SEQ ID NO: 1558 - protein, 8 aa, synthetic construct
  REGION 1..8: note = Description of Artificial Sequence: Synthetic peptide
DYLYSCDY

SEQ ID NO: 1559 - protein, 7 aa, synthetic construct
  REGION 1..7: note = Description of Artificial Sequence: Synthetic peptide
SQSISSY

SEQ ID NO: 1560 - protein, 8 aa, synthetic construct
  REGION 1..8: note = Description of Artificial Sequence: Synthetic peptide
SQSISSSF

SEQ ID NO: 1561 - protein, 12 aa, synthetic construct
  REGION 1..12: note = Description of Artificial Sequence: Synthetic peptide
SQSLLHSNGYNY

SEQ ID NO: 1562 - protein, 12 aa, synthetic construct
  REGION 1..12: note = Description of Artificial Sequence: Synthetic peptide
SQSLLRNDGKTP

SEQ ID NO: 1563 - protein, 12 aa, synthetic construct
  REGION 1..12: note = Description of Artificial Sequence: Synthetic peptide
SQSLLHSNGYNY

SEQ ID NO: 1564 - protein, 7 aa, synthetic construct
  REGION 1..7: note = Description of Artificial Sequence: Synthetic peptide
SQSISSY

SEQ ID NO: 1565 - protein, 12 aa, synthetic construct
  REGION 1..12: note = Description of Artificial Sequence: Synthetic peptide
SQSLLYSNGYNY

SEQ ID NO: 1566 - protein, 7 aa, synthetic construct
  REGION 1..7: note = Description of Artificial Sequence: Synthetic peptide
SQSVSSN

SEQ ID NO: 1567 - protein, 7 aa, synthetic construct
  REGION 1..7: note = Description of Artificial Sequence: Synthetic peptide
SQSVSSK

SEQ ID NO: 1568 - protein, 8 aa, synthetic construct
  REGION 1..8: note = Description of Artificial Sequence: Synthetic peptide
SQSVGSTN

SEQ ID NO: 1569 - protein, 7 aa, synthetic construct
  REGION 1..7: note = Description of Artificial Sequence: Synthetic peptide
SQSISSY

SEQ ID NO: 1570 - protein, 12 aa, synthetic construct
  REGION 1..12: note = Description of Artificial Sequence: Synthetic peptide
SESLVHNSGKTY

SEQ ID NO: 1571 - protein, 7 aa, synthetic construct
  REGION 1..7: note = Description of Artificial Sequence: Synthetic peptide
SEDINKF

SEQ ID NO: 1572 - protein, 7 aa, synthetic construct
  REGION 1..7: note = Description of Artificial Sequence: Synthetic peptide
SQSVGSN

SEQ ID NO: 1573 - protein, 8 aa, synthetic construct
  REGION 1..8: note = Description of Artificial Sequence: Synthetic peptide
SQSIGSSS

SEQ ID NO: 1574 - protein, 7 aa, synthetic construct
  REGION 1..7: note = Description of Artificial Sequence: Synthetic peptide
SQDIDDA

SEQ ID NO: 1575 - protein, 7 aa, synthetic construct
  REGION 1..7: note = Description of Artificial Sequence: Synthetic peptide
SQDIYNN

SEQ ID NO: 1576 - protein, 12 aa, synthetic construct
  REGION 1..12: note = Description of Artificial Sequence: Synthetic peptide
SQSLLHSNGYNY

SEQ ID NO: 1577 - protein, 7 aa, synthetic construct
  REGION 1..7: note = Description of Artificial Sequence: Synthetic peptide
NNIGTKS

SEQ ID NO: 1578 - protein, 7 aa, synthetic construct
  REGION 1..7: note = Description of Artificial Sequence: Synthetic peptide
DGLSKKY

SEQ ID NO: 1579 - protein, 7 aa, synthetic construct
  REGION 1..7: note = Description of Artificial Sequence: Synthetic peptide
SQGIRNW

SEQ ID NO: 1580 - protein, 7 aa, synthetic construct
  REGION 1..7: note = Description of Artificial Sequence: Synthetic peptide
NNIGSKS

SEQ ID NO: 1581 - protein, 7 aa, synthetic construct
  REGION 1..7: note = Description of Artificial Sequence: Synthetic peptide
DSLGNYY

SEQ ID NO: 1582 - protein, 8 aa, synthetic construct
  REGION 1..8: note = Description of Artificial Sequence: Synthetic peptide
SQSVSSAY

SEQ ID NO: 1583 - protein, 7 aa, synthetic construct
  REGION 1..7: note = Description of Artificial Sequence: Synthetic peptide
SQSVSNS

SEQ ID NO: 1584 - protein, 8 aa, synthetic construct
  REGION 1..8: note = Description of Artificial Sequence: Synthetic peptide
SQSVSSSF

SEQ ID NO: 1585 - protein, 8 aa, synthetic construct
  REGION 1..8: note = Description of Artificial Sequence: Synthetic peptide
SQSVSTTF

SEQ ID NO: 1586 - protein, 7 aa, synthetic construct
  REGION 1..7: note = Description of Artificial Sequence: Synthetic peptide
SQSISSY

SEQ ID NO: 1587 - protein, 8 aa, synthetic construct
  REGION 1..8: note = Description of Artificial Sequence: Synthetic peptide
TQSIGSSF

SEQ ID NO: 1588 - protein, 8 aa, synthetic construct
  REGION 1..8: note = Description of Artificial Sequence: Synthetic peptide
SQSVSSSY

SEQ ID NO: 1589 - protein, 8 aa, synthetic construct
  REGION 1..8: note = Description of Artificial Sequence: Synthetic peptide
SQSVSSSY

SEQ ID NO: 1590 - protein, 8 aa, synthetic construct
  REGION 1..8: note = Description of Artificial Sequence: Synthetic peptide
SQRVASNY

SEQ ID NO: 1591 - protein, 8 aa, synthetic construct
  REGION 1..8: note = Description of Artificial Sequence: Synthetic peptide
SQSLSSNF

SEQ ID NO: 1592 - protein, 12 aa, synthetic construct
  REGION 1..12: note = Description of Artificial Sequence: Synthetic peptide
SQSLLHSNGYNY

SEQ ID NO: 1593 - protein, 8 aa, synthetic construct
  REGION 1..8: note = Description of Artificial Sequence: Synthetic peptide
SQSVSSSY

SEQ ID NO: 1594 - protein, 8 aa, synthetic construct
  REGION 1..8: note = Description of Artificial Sequence: Synthetic peptide
SQSVASSF

SEQ ID NO: 1595 - protein, 7 aa, synthetic construct
  REGION 1..7: note = Description of Artificial Sequence: Synthetic peptide
SQDVNTA

SEQ ID NO: 1596 - protein, 11 aa, synthetic construct
  REGION 1..11: note = Description of Artificial Sequence: Synthetic peptide
SESVSVIGAHL

SEQ ID NO: 1597 - protein, 11 aa, synthetic construct
  REGION 1..11: note = Description of Artificial Sequence: Synthetic peptide
SESVTILGSHL

SEQ ID NO: 1598 - protein, 11 aa, synthetic construct
  REGION 1..11: note = Description of Artificial Sequence: Synthetic peptide
SESVTILGSHL

SEQ ID NO: 1599-1638 - skipped (40 entries)

SEQ ID NO: 1639 - protein, 6 aa, synthetic construct
  REGION 1..6: note = Description of Artificial Sequence: Synthetic peptide
SYSTPY

SEQ ID NO: 1640 - protein, 7 aa, synthetic construct
  REGION 1..7: note = Description of Artificial Sequence: Synthetic peptide
YHSSPSW

SEQ ID NO: 1641 - protein, 6 aa, synthetic construct
  REGION 1..6: note = Description of Artificial Sequence: Synthetic peptide
ALQTPY

SEQ ID NO: 1642 - protein, 5 aa, synthetic construct
  REGION 1..5: note = Description of Artificial Sequence: Synthetic peptide
NIQFP

SEQ ID NO: 1643 - protein, 6 aa, synthetic construct
  REGION 1..6: note = Description of Artificial Sequence: Synthetic peptide
ALQTPY

SEQ ID NO: 1644 - protein, 5 aa, synthetic construct
  REGION 1..5: note = Description of Artificial Sequence: Synthetic peptide
SYKRA

SEQ ID NO: 1645 - protein, 6 aa, synthetic construct
  REGION 1..6: note = Description of Artificial Sequence: Synthetic peptide
GRQFPY

SEQ ID NO: 1646 - protein, 5 aa, synthetic construct
  REGION 1..5: note = Description of Artificial Sequence: Synthetic peptide
YGSSL

SEQ ID NO: 1647 - protein, 6 aa, synthetic construct
  REGION 1..6: note = Description of Artificial Sequence: Synthetic peptide
YGSSSW

SEQ ID NO: 1648 - protein, 7 aa, synthetic construct
  REGION 1..7: note = Description of Artificial Sequence: Synthetic peptide
YGSSPPW

SEQ ID NO: 1649 - protein, 4 aa, synthetic construct
  REGION 1..4: note = Description of Artificial Sequence: Synthetic peptide
SYTL

SEQ ID NO: 1650 - protein, 6 aa, synthetic construct
  REGION 1..6: note = Description of Artificial Sequence: Synthetic peptide
GTHWPG

SEQ ID NO: 1651 - protein, 6 aa, synthetic construct
  REGION 1..6: note = Description of Artificial Sequence: Synthetic peptide
YESLPL

SEQ ID NO: 1652 - protein, 7 aa, synthetic construct
  REGION 1..7: note = Description of Artificial Sequence: Synthetic peptide
YNDWLPV

SEQ ID NO: 1653 - protein, 7 aa, synthetic construct
  REGION 1..7: note = Description of Artificial Sequence: Synthetic peptide
YAGSPPF

SEQ ID NO: 1654 - protein, 6 aa, synthetic construct
  REGION 1..6: note = Description of Artificial Sequence: Synthetic peptide
HDNFPL

SEQ ID NO: 1655 - protein, 6 aa, synthetic construct
  REGION 1..6: note = Description of Artificial Sequence: Synthetic peptide
YYRFPY

SEQ ID NO: 1656 - protein, 6 aa, synthetic construct
  REGION 1..6: note = Description of Artificial Sequence: Synthetic peptide
ALQTPY

SEQ ID NO: 1657 - protein, 8 aa, synthetic construct
  REGION 1..8: note = Description of Artificial Sequence: Synthetic peptide
WDSDSEHV

SEQ ID NO: 1658 - protein, 6 aa, synthetic construct
  REGION 1..6: note = Description of Artificial Sequence: Synthetic peptide
WDDTTV

SEQ ID NO: 1659 - protein, 6 aa, synthetic construct
  REGION 1..6: note = Description of Artificial Sequence: Synthetic peptide
YNSAPF

SEQ ID NO: 1660 - protein, 9 aa, synthetic construct
  REGION 1..9: note = Description of Artificial Sequence: Synthetic peptide
RDSSGDHLR

SEQ ID NO: 1661 - protein, 8 aa, synthetic construct
  REGION 1..8: note = Description of Artificial Sequence: Synthetic peptide
RDSSGHHL

SEQ ID NO: 1662 - protein, 11 aa, synthetic construct
  REGION 1..11: note = Description of Artificial Sequence: Synthetic peptide
YGSSFNGSSLF

SEQ ID NO: 1663 - protein, 7 aa, synthetic construct
  REGION 1..7: note = Description of Artificial Sequence: Synthetic peptide
FGTSSGL

SEQ ID NO: 1664 - protein, 7 aa, synthetic construct
  REGION 1..7: note = Description of Artificial Sequence: Synthetic peptide
YHSSPSW

SEQ ID NO: 1665 - protein, 7 aa, synthetic construct
  REGION 1..7: note = Description of Artificial Sequence: Synthetic peptide
YHSSPSW

SEQ ID NO: 1666 - protein, 6 aa, synthetic construct
  REGION 1..6: note = Description of Artificial Sequence: Synthetic peptide
SYSTPY

SEQ ID NO: 1667 - protein, 7 aa, synthetic construct
  REGION 1..7: note = Description of Artificial Sequence: Synthetic peptide
YESSPSW

SEQ ID NO: 1668 - protein, 7 aa, synthetic construct
  REGION 1..7: note = Description of Artificial Sequence: Synthetic peptide
YGSPPRF

SEQ ID NO: 1669 - protein, 7 aa, synthetic construct
  REGION 1..7: note = Description of Artificial Sequence: Synthetic peptide
YGSSPSW

SEQ ID NO: 1670 - protein, 7 aa, synthetic construct
  REGION 1..7: note = Description of Artificial Sequence: Synthetic peptide
YDSSPSW

SEQ ID NO: 1671 - protein, 7 aa, synthetic construct
  REGION 1..7: note = Description of Artificial Sequence: Synthetic peptide
YGTSPMY

SEQ ID NO: 1672 - protein, 6 aa, synthetic construct
  REGION 1..6: note = Description of Artificial Sequence: Synthetic peptide
ALQTPL

SEQ ID NO: 1673 - protein, 8 aa, synthetic construct
  REGION 1..8: note = Description of Artificial Sequence: Synthetic peptide
YGNSPPKF

SEQ ID NO: 1674 - protein, 7 aa, synthetic construct
  REGION 1..7: note = Description of Artificial Sequence: Synthetic peptide
YGGSPRL

SEQ ID NO: 1675 - protein, 6 aa, synthetic construct
  REGION 1..6: note = Description of Artificial Sequence: Synthetic peptide
HYSTPW

SEQ ID NO: 1676 - protein, 6 aa, synthetic construct
  REGION 1..6: note = Description of Artificial Sequence: Synthetic peptide
SRIFPR

SEQ ID NO: 1677 - protein, 6 aa, synthetic construct
  REGION 1..6: note = Description of Artificial Sequence: Synthetic peptide
SRTIPR

SEQ ID NO: 1678 - protein, 6 aa, synthetic construct
  REGION 1..6: note = Description of Artificial Sequence: Synthetic peptide
SRTIPR

SEQ ID NO: 1679 - protein, 10 aa, synthetic construct
  REGION 1..10: note = Description of Artificial Sequence: Synthetic peptide
GFALSNHGMS

SEQ ID NO: 1680 - protein, 10 aa, synthetic construct
  REGION 1..10: note = Description of Artificial Sequence: Synthetic peptide
GFTFSNYAMS

SEQ ID NO: 1681 - protein, 10 aa, synthetic construct
  REGION 1..10: note = Description of Artificial Sequence: Synthetic peptide
GFTFDDYAMH

SEQ ID NO: 1682 - protein, 10 aa, synthetic construct
  REGION 1..10: note = Description of Artificial Sequence: Synthetic peptide
GFALSNHGMS

SEQ ID NO: 1683 - protein, 10 aa, synthetic construct
  REGION 1..10: note = Description of Artificial Sequence: Synthetic peptide
GYIFDNFGIN

SEQ ID NO: 1684 - protein, 10 aa, synthetic construct
  REGION 1..10: note = Description of Artificial Sequence: Synthetic peptide
GFTFSSDAMT

SEQ ID NO: 1685 - protein, 10 aa, synthetic construct
  REGION 1..10: note = Description of Artificial Sequence: Synthetic peptide
GYTFSNYGIT

SEQ ID NO: 1686 - protein, 10 aa, synthetic construct
  REGION 1..10: note = Description of Artificial Sequence: Synthetic peptide
GFALSNHGMS

SEQ ID NO: 1687 - protein, 10 aa, synthetic construct
  REGION 1..10: note = Description of Artificial Sequence: Synthetic peptide
GFALSNHGMS

SEQ ID NO: 1688 - protein, 10 aa, synthetic construct
  REGION 1..10: note = Description of Artificial Sequence: Synthetic peptide
GFALSNHGMS

SEQ ID NO: 1689 - protein, 10 aa, synthetic construct
  REGION 1..10: note = Description of Artificial Sequence: Synthetic peptide
GFTFSDYYMS

SEQ ID NO: 1690 - protein, 10 aa, synthetic construct
  REGION 1..10: note = Description of Artificial Sequence: Synthetic peptide
GFTFSDYYMS

SEQ ID NO: 1691 - protein, 10 aa, synthetic construct
  REGION 1..10: note = Description of Artificial Sequence: Synthetic peptide
GFALSNHGMS

SEQ ID NO: 1692 - protein, 10 aa, synthetic construct
  REGION 1..10: note = Description of Artificial Sequence: Synthetic peptide
GFALSNHGMS

SEQ ID NO: 1693 - protein, 10 aa, synthetic construct
  REGION 1..10: note = Description of Artificial Sequence: Synthetic peptide
GFALSNHGMS

SEQ ID NO: 1694 - protein, 12 aa, synthetic construct
  REGION 1..12: note = Description of Artificial Sequence: Synthetic peptide
GGSISSSYYYWG

SEQ ID NO: 1695 - protein, 12 aa, synthetic construct
  REGION 1..12: note = Description of Artificial Sequence: Synthetic peptide
GFSLRTSGMCVS

SEQ ID NO: 1696 - protein, 10 aa, synthetic construct
  REGION 1..10: note = Description of Artificial Sequence: Synthetic peptide
GFTFSSYSMN

SEQ ID NO: 1697 - protein, 10 aa, synthetic construct
  REGION 1..10: note = Description of Artificial Sequence: Synthetic peptide
GFTFSDYYMS

SEQ ID NO: 1698 - protein, 10 aa, synthetic construct
  REGION 1..10: note = Description of Artificial Sequence: Synthetic peptide
GYTVTSHYIH

SEQ ID NO: 1699 - protein, 12 aa, synthetic construct
  REGION 1..12: note = Description of Artificial Sequence: Synthetic peptide
GGSISSGGYYWS

SEQ ID NO: 1700 - protein, 10 aa, synthetic construct
  REGION 1..10: note = Description of Artificial Sequence: Synthetic peptide
GGTFSSYAIS

SEQ ID NO: 1701 - protein, 12 aa, synthetic construct
  REGION 1..12: note = Description of Artificial Sequence: Synthetic peptide
GDSVSSNSAAWN

SEQ ID NO: 1702 - protein, 10 aa, synthetic construct
  REGION 1..10: note = Description of Artificial Sequence: Synthetic peptide
GFTFSSYAMS

SEQ ID NO: 1703 - protein, 10 aa, synthetic construct
  REGION 1..10: note = Description of Artificial Sequence: Synthetic peptide
GITFSRYPMS

SEQ ID NO: 1704 - protein, 10 aa, synthetic construct
  REGION 1..10: note = Description of Artificial Sequence: Synthetic peptide
GFTFSSYAMS

SEQ ID NO: 1705 - protein, 10 aa, synthetic construct
  REGION 1..10: note = Description of Artificial Sequence: Synthetic peptide
GFTFSSYAMS

SEQ ID NO: 1706 - protein, 10 aa, synthetic construct
  REGION 1..10: note = Description of Artificial Sequence: Synthetic peptide
GFTFDDYAMH

SEQ ID NO: 1707 - protein, 10 aa, synthetic construct
  REGION 1..10: note = Description of Artificial Sequence: Synthetic peptide
GFTFDDYAMH

SEQ ID NO: 1708 - protein, 10 aa, synthetic construct
  REGION 1..10: note = Description of Artificial Sequence: Synthetic peptide
GFTFSSYAMS

SEQ ID NO: 1709 - protein, 10 aa, synthetic construct
  REGION 1..10: note = Description of Artificial Sequence: Synthetic peptide
GFTFSSYAMS

SEQ ID NO: 1710 - protein, 10 aa, synthetic construct
  REGION 1..10: note = Description of Artificial Sequence: Synthetic peptide
GFTFSSYAMS

SEQ ID NO: 1711 - protein, 10 aa, synthetic construct
  REGION 1..10: note = Description of Artificial Sequence: Synthetic peptide
GFSFSSYAMS

SEQ ID NO: 1712 - protein, 10 aa, synthetic construct
  REGION 1..10: note = Description of Artificial Sequence: Synthetic peptide
GFTFSSYAMS

SEQ ID NO: 1713 - protein, 10 aa, synthetic construct
  REGION 1..10: note = Description of Artificial Sequence: Synthetic peptide
GFTFSSYAMS

SEQ ID NO: 1714 - protein, 10 aa, synthetic construct
  REGION 1..10: note = Description of Artificial Sequence: Synthetic peptide
GFTFSSYAMS

SEQ ID NO: 1715 - protein, 10 aa, synthetic construct
  REGION 1..10: note = Description of Artificial Sequence: Synthetic peptide
GYTFTNFGMN

SEQ ID NO: 1716 - protein, 10 aa, synthetic construct
  REGION 1..10: note = Description of Artificial Sequence: Synthetic peptide
GYTFTDYSIN

SEQ ID NO: 1717 - protein, 10 aa, synthetic construct
  REGION 1..10: note = Description of Artificial Sequence: Synthetic peptide
GYTFRHYSMN

SEQ ID NO: 1718 - protein, 10 aa, synthetic construct
  REGION 1..10: note = Description of Artificial Sequence: Synthetic peptide
GYTFTHYSMN

SEQ ID NO: 1719 - protein, 16 aa, synthetic construct
  REGION 1..16: note = Description of Artificial Sequence: Synthetic peptide
GIVYSGSTYYAASVKG

SEQ ID NO: 1720 - protein, 17 aa, synthetic construct
  REGION 1..17: note = Description of Artificial Sequence: Synthetic peptide
GISRSGENTYYADSVKG

SEQ ID NO: 1721 - protein, 17 aa, synthetic construct
  REGION 1..17: note = Description of Artificial Sequence: Synthetic peptide
GISWNSGSIGYADSVKG

SEQ ID NO: 1722 - protein, 16 aa, synthetic construct
  REGION 1..16: note = Description of Artificial Sequence: Synthetic peptide
GIVYSGSTYYAASVKG

SEQ ID NO: 1723 - protein, 17 aa, synthetic construct
  REGION 1..17: note = Description of Artificial Sequence: Synthetic peptide
WINPKNNNTNYAQKFQG

SEQ ID NO: 1724 - protein, 17 aa, synthetic construct
  REGION 1..17: note = Description of Artificial Sequence: Synthetic peptide
VISGSGGTTYYADSVKG

SEQ ID NO: 1725 - protein, 17 aa, synthetic construct
  REGION 1..17: note = Description of Artificial Sequence: Synthetic peptide
WISAYNGNTNYAQKFQG

SEQ ID NO: 1726 - protein, 16 aa, synthetic construct
  REGION 1..16: note = Description of Artificial Sequence: Synthetic peptide
GIVYSGSTYYAASVKG

SEQ ID NO: 1727 - protein, 16 aa, synthetic construct
  REGION 1..16: note = Description of Artificial Sequence: Synthetic peptide
GIVYSGSTYYAASVKG

SEQ ID NO: 1728 - protein, 16 aa, synthetic construct
  REGION 1..16: note = Description of Artificial Sequence: Synthetic peptide
GIVYSGSTYYAASVKG

SEQ ID NO: 1729 - protein, 17 aa, synthetic construct
  REGION 1..17: note = Description of Artificial Sequence: Synthetic peptide
YISSSGSTIYYADSVKG

SEQ ID NO: 1730 - protein, 17 aa, synthetic construct
  REGION 1..17: note = Description of Artificial Sequence: Synthetic peptide
YISSSGNTIYYADSVKG

SEQ ID NO: 1731 - protein, 16 aa, synthetic construct
  REGION 1..16: note = Description of Artificial Sequence: Synthetic peptide
GIVYSGSTYYAASVKG

SEQ ID NO: 1732 - protein, 16 aa, synthetic construct
  REGION 1..16: note = Description of Artificial Sequence: Synthetic peptide
GIVYSGSTYYAASVKG

SEQ ID NO: 1733 - protein, 16 aa, synthetic construct
  REGION 1..16: note = Description of Artificial Sequence: Synthetic peptide
GIVYSGSTYYAASVKG

SEQ ID NO: 1734 - protein, 16 aa, synthetic construct
  REGION 1..16: note = Description of Artificial Sequence: Synthetic peptide
SIYYSGSAYYNPSLKS

SEQ ID NO: 1735 - protein, 16 aa, synthetic construct
  REGION 1..16: note = Description of Artificial Sequence: Synthetic peptide
RIDWDEDKFYSTSLKT

SEQ ID NO: 1736 - protein, 17 aa, synthetic construct
  REGION 1..17: note = Description of Artificial Sequence: Synthetic peptide
SISSSSSYIYYADSVKG

SEQ ID NO: 1737 - protein, 17 aa, synthetic construct
  REGION 1..17: note = Description of Artificial Sequence: Synthetic peptide
YISSSGSTIYYADSVKG

SEQ ID NO: 1738 - protein, 17 aa, synthetic construct
  REGION 1..17: note = Description of Artificial Sequence: Synthetic peptide
MINPSGGVTAYSQTLQG

SEQ ID NO: 1739 - protein, 16 aa, synthetic construct
  REGION 1..16: note = Description of Artificial Sequence: Synthetic peptide
YIYYSGSTYYNPSLKS

SEQ ID NO: 1740 - protein, 17 aa, synthetic construct
  REGION 1..17: note = Description of Artificial Sequence: Synthetic peptide
GIIPIFGTANYAQKFQG

SEQ ID NO: 1741 - protein, 18 aa, synthetic construct
  REGION 1..18: note = Description of Artificial Sequence: Synthetic peptide
RTYYRSKWYSFYAISLKS

SEQ ID NO: 1742 - protein, 17 aa, synthetic construct
  REGION 1..17: note = Description of Artificial Sequence: Synthetic peptide
AISGSGGSTYYADSVKG

SEQ ID NO: 1743 - protein, 17 aa, synthetic construct
  REGION 1..17: note = Description of Artificial Sequence: Synthetic peptide
GISDSGVSTYYADSAKG

SEQ ID NO: 1744 - protein, 17 aa, synthetic construct
  REGION 1..17: note = Description of Artificial Sequence: Synthetic peptide
AISGSGGSTYYADSVKG

SEQ ID NO: 1745 - protein, 17 aa, synthetic construct
  REGION 1..17: note = Description of Artificial Sequence: Synthetic peptide
AISGSGGSTYYADSVKG

SEQ ID NO: 1746 - protein, 17 aa, synthetic construct
  REGION 1..17: note = Description of Artificial Sequence: Synthetic peptide
GISWNSGSIGYADSVKG

SEQ ID NO: 1747 - protein, 17 aa, synthetic construct
  REGION 1..17: note = Description of Artificial Sequence: Synthetic peptide
SINWKGNSLAYGDSVKG

SEQ ID NO: 1748 - protein, 17 aa, synthetic construct
  REGION 1..17: note = Description of Artificial Sequence: Synthetic peptide
AISGSGGSTYYADSVKG

SEQ ID NO: 1749 - protein, 17 aa, synthetic construct
  REGION 1..17: note = Description of Artificial Sequence: Synthetic peptide
AISGSGGSTYYADSVKG

SEQ ID NO: 1750 - protein, 17 aa, synthetic construct
  REGION 1..17: note = Description of Artificial Sequence: Synthetic peptide
AISGSGGSTYYADSVKG

SEQ ID NO: 1751 - protein, 17 aa, synthetic construct
  REGION 1..17: note = Description of Artificial Sequence: Synthetic peptide
AISGSGGSTYYADSVKG

SEQ ID NO: 1752 - protein, 17 aa, synthetic construct
  REGION 1..17: note = Description of Artificial Sequence: Synthetic peptide
AISGSGGSTYYADSVKG

SEQ ID NO: 1753 - protein, 17 aa, synthetic construct
  REGION 1..17: note = Description of Artificial Sequence: Synthetic peptide
AISGSGGSTYYADSVKG

SEQ ID NO: 1754 - protein, 17 aa, synthetic construct
  REGION 1..17: note = Description of Artificial Sequence: Synthetic peptide
AISGSGGSTYYADSVKG

SEQ ID NO: 1755 - protein, 17 aa, synthetic construct
  REGION 1..17: note = Description of Artificial Sequence: Synthetic peptide
WINTYTGESYFADDFKG

SEQ ID NO: 1756 - protein, 17 aa, synthetic construct
  REGION 1..17: note = Description of Artificial Sequence: Synthetic peptide
WINTETREPAYAYDFRG

SEQ ID NO: 1757 - protein, 17 aa, synthetic construct
  REGION 1..17: note = Description of Artificial Sequence: Synthetic peptide
RINTESGVPIYADDFKG

SEQ ID NO: 1758 - protein, 17 aa, synthetic construct
  REGION 1..17: note = Description of Artificial Sequence: Synthetic peptide
RINTETGEPLYADDFKG

SEQ ID NO: 1759 - protein, 7 aa, synthetic construct
  REGION 1..7: note = Description of Artificial Sequence: Synthetic peptide
HGGESDV

SEQ ID NO: 1760 - protein, 11 aa, synthetic construct
  REGION 1..11: note = Description of Artificial Sequence: Synthetic peptide
SPAHYYGGMDV

SEQ ID NO: 1761 - protein, 6 aa, synthetic construct
  REGION 1..6: note = Description of Artificial Sequence: Synthetic peptide
HSFLAY

SEQ ID NO: 1762 - protein, 7 aa, synthetic construct
  REGION 1..7: note = Description of Artificial Sequence: Synthetic peptide
HGGESDV

SEQ ID NO: 1763 - protein, 11 aa, synthetic construct
  REGION 1..11: note = Description of Artificial Sequence: Synthetic peptide
GPYYYQSYMDV

SEQ ID NO: 1764 - protein, 14 aa, synthetic construct
  REGION 1..14: note = Description of Artificial Sequence: Synthetic peptide
LDSSGYYYARGPRY

SEQ ID NO: 1765 - protein, 9 aa, synthetic construct
  REGION 1..9: note = Description of Artificial Sequence: Synthetic peptide
GPYYYYMDV

SEQ ID NO: 1766 - protein, 7 aa, synthetic construct
  REGION 1..7: note = Description of Artificial Sequence: Synthetic peptide
HGGESDV

SEQ ID NO: 1767 - protein, 7 aa, synthetic construct
  REGION 1..7: note = Description of Artificial Sequence: Synthetic peptide
HGGESDV

SEQ ID NO: 1768 - protein, 7 aa, synthetic construct
  REGION 1..7: note = Description of Artificial Sequence: Synthetic peptide
HGGESDV

SEQ ID NO: 1769 - protein, 8 aa, synthetic construct
  REGION 1..8: note = Description of Artificial Sequence: Synthetic peptide
ESGDGMDV

SEQ ID NO: 1770 - protein, 8 aa, synthetic construct
  REGION 1..8: note = Description of Artificial Sequence: Synthetic peptide
STMVREDY

SEQ ID NO: 1771 - protein, 7 aa, synthetic construct
  REGION 1..7: note = Description of Artificial Sequence: Synthetic peptide
HGGESDV

SEQ ID NO: 1772 - protein, 7 aa, synthetic construct
  REGION 1..7: note = Description of Artificial Sequence: Synthetic peptide
HGGESDV

SEQ ID NO: 1773 - protein, 7 aa, synthetic construct
  REGION 1..7: note = Description of Artificial Sequence: Synthetic peptide
HGGESDV

SEQ ID NO: 1774 - protein, 11 aa, synthetic construct
  REGION 1..11: note = Description of Artificial Sequence: Synthetic peptide
HWQEWPDAFDI

SEQ ID NO: 1775 - protein, 13 aa, synthetic construct
  REGION 1..13: note = Description of Artificial Sequence: Synthetic peptide
SGAGGTSATAFDI

SEQ ID NO: 1776 - protein, 10 aa, synthetic construct
  REGION 1..10: note = Description of Artificial Sequence: Synthetic peptide
TIAAVYAFDI

SEQ ID NO: 1777 - protein, 8 aa, synthetic construct
  REGION 1..8: note = Description of Artificial Sequence: Synthetic peptide
DLRGAFDI

SEQ ID NO: 1778 - protein, 11 aa, synthetic construct
  REGION 1..11: note = Description of Artificial Sequence: Synthetic peptide
EGSGSGWYFDF

SEQ ID NO: 1779 - protein, 13 aa, synthetic construct
  REGION 1..13: note = Description of Artificial Sequence: Synthetic peptide
AGIAARLRGAFDI

SEQ ID NO: 1780 - protein, 20 aa, synthetic construct
  REGION 1..20: note = Description of Artificial Sequence: Synthetic peptide
RGGYQLLRWDVGLLRSAFDI

SEQ ID NO: 1781 - protein, 13 aa, synthetic construct
  REGION 1..13: note = Description of Artificial Sequence: Synthetic peptide
SSPEGLFLYWFDP

SEQ ID NO: 1782 - protein, 9 aa, synthetic construct
  REGION 1..9: note = Description of Artificial Sequence: Synthetic peptide
VEGSGSLDY

SEQ ID NO: 1783 - protein, 9 aa, synthetic construct
  REGION 1..9: note = Description of Artificial Sequence: Synthetic peptide
RAGSEASDI

SEQ ID NO: 1784 - protein, 15 aa, synthetic construct
  REGION 1..15: note = Description of Artificial Sequence: Synthetic peptide
ATYKRELRYYYGMDV

SEQ ID NO: 1785 - protein, 15 aa, synthetic construct
  REGION 1..15: note = Description of Artificial Sequence: Synthetic peptide
ATYKRELRYYYGMDV

SEQ ID NO: 1786 - protein, 8 aa, synthetic construct
  REGION 1..8: note = Description of Artificial Sequence: Synthetic peptide
VGKAVPDV

SEQ ID NO: 1787 - protein, 13 aa, synthetic construct
  REGION 1..13: note = Description of Artificial Sequence: Synthetic peptide
HQGVAYYNYAMDV

SEQ ID NO: 1788 - protein, 8 aa, synthetic construct
  REGION 1..8: note = Description of Artificial Sequence: Synthetic peptide
VVRDGMDV

SEQ ID NO: 1789 - protein, 9 aa, synthetic construct
  REGION 1..9: note = Description of Artificial Sequence: Synthetic peptide
IPQTGTFDY

SEQ ID NO: 1790 - protein, 15 aa, synthetic construct
  REGION 1..15: note = Description of Artificial Sequence: Synthetic peptide
ANYKRELRYYYGMDV

SEQ ID NO: 1791 - protein, 11 aa, synthetic construct
  REGION 1..11: note = Description of Artificial Sequence: Synthetic peptide
ALVGATGAFDI

SEQ ID NO: 1792 - protein, 8 aa, synthetic construct
  REGION 1..8: note = Description of Artificial Sequence: Synthetic peptide
WFGEGFDP

SEQ ID NO: 1793 - protein, 17 aa, synthetic construct
  REGION 1..17: note = Description of Artificial Sequence: Synthetic peptide
VGYDSSGYYRDYYGMDV

SEQ ID NO: 1794 - protein, 13 aa, synthetic construct
  REGION 1..13: note = Description of Artificial Sequence: Synthetic peptide
MGWSSGYLGAFDI

SEQ ID NO: 1795 - protein, 13 aa, synthetic construct
  REGION 1..13: note = Description of Artificial Sequence: Synthetic peptide
GEIYYGYDGGFAY

SEQ ID NO: 1796 - protein, 8 aa, synthetic construct
  REGION 1..8: note = Description of Artificial Sequence: Synthetic peptide
DYSYAMDY

SEQ ID NO: 1797 - protein, 8 aa, synthetic construct
  REGION 1..8: note = Description of Artificial Sequence: Synthetic peptide
DYLYSLDF

SEQ ID NO: 1798 - protein, 8 aa, synthetic construct
  REGION 1..8: note = Description of Artificial Sequence: Synthetic peptide
DYLYSCDY

SEQ ID NO: 1799 - protein, 11 aa, synthetic construct
  REGION 1..11: note = Description of Artificial Sequence: Synthetic peptide
RASQSISSYLN

SEQ ID NO: 1800 - protein, 12 aa, synthetic construct
  REGION 1..12: note = Description of Artificial Sequence: Synthetic peptide
RASQSISSSFLA

SEQ ID NO: 1801 - protein, 16 aa, synthetic construct
  REGION 1..16: note = Description of Artificial Sequence: Synthetic peptide
RSSQSLLHSNGYNYLD

SEQ ID NO: 1802 - protein, 16 aa, synthetic construct
  REGION 1..16: note = Description of Artificial Sequence: Synthetic peptide
KSSQSLLRNDGKTPLY

SEQ ID NO: 1803 - protein, 16 aa, synthetic construct
  REGION 1..16: note = Description of Artificial Sequence: Synthetic peptide
RSSQSLLHSNGYNYLN

SEQ ID NO: 1804 - protein, 11 aa, synthetic construct
  REGION 1..11: note = Description of Artificial Sequence: Synthetic peptide
RASQSISSYLN

SEQ ID NO: 1805 - protein, 16 aa, synthetic construct
  REGION 1..16: note = Description of Artificial Sequence: Synthetic peptide
RSSQSLLYSNGYNYVD

SEQ ID NO: 1806 - protein, 11 aa, synthetic construct
  REGION 1..11: note = Description of Artificial Sequence: Synthetic peptide
RASQSVSSNLA

SEQ ID NO: 1807 - protein, 11 aa, synthetic construct
  REGION 1..11: note = Description of Artificial Sequence: Synthetic peptide
RASQSVSSKLA

SEQ ID NO: 1808 - protein, 12 aa, synthetic construct
  REGION 1..12: note = Description of Artificial Sequence: Synthetic peptide
RASQSVGSTNLA

SEQ ID NO: 1809 - protein, 11 aa, synthetic construct
  REGION 1..11: note = Description of Artificial Sequence: Synthetic peptide
RASQSISSYLN

SEQ ID NO: 1810 - protein, 16 aa, synthetic construct
  REGION 1..16: note = Description of Artificial Sequence: Synthetic peptide
KSSESLVHNSGKTYLN

SEQ ID NO: 1811 - protein, 11 aa, synthetic construct
  REGION 1..11: note = Description of Artificial Sequence: Synthetic peptide
QASEDINKFLN

SEQ ID NO: 1812 - protein, 11 aa, synthetic construct
  REGION 1..11: note = Description of Artificial Sequence: Synthetic peptide
RASQSVGSNLA

SEQ ID NO: 1813 - protein, 12 aa, synthetic construct
  REGION 1..12: note = Description of Artificial Sequence: Synthetic peptide
RASQSIGSSSLA

SEQ ID NO: 1814 - protein, 11 aa, synthetic construct
  REGION 1..11: note = Description of Artificial Sequence: Synthetic peptide
KASQDIDDAMN

SEQ ID NO: 1815 - protein, 11 aa, synthetic construct
  REGION 1..11: note = Description of Artificial Sequence: Synthetic peptide
RASQDIYNNLA

SEQ ID NO: 1816 - protein, 16 aa, synthetic construct
  REGION 1..16: note = Description of Artificial Sequence: Synthetic peptide
RSSQSLLHSNGYNYLD

SEQ ID NO: 1817 - protein, 11 aa, synthetic construct
  REGION 1..11: note = Description of Artificial Sequence: Synthetic peptide
GGNNIGTKSVH

SEQ ID NO: 1818 - protein, 11 aa, synthetic construct
  REGION 1..11: note = Description of Artificial Sequence: Synthetic peptide
SGDGLSKKYVS

SEQ ID NO: 1819 - protein, 11 aa, synthetic construct
  REGION 1..11: note = Description of Artificial Sequence: Synthetic peptide
RASQGIRNWLA

SEQ ID NO: 1820 - protein, 11 aa, synthetic construct
  REGION 1..11: note = Description of Artificial Sequence: Synthetic peptide
GGNNIGSKSVH

SEQ ID NO: 1821 - protein, 11 aa, synthetic construct
  REGION 1..11: note = Description of Artificial Sequence: Synthetic peptide
QGDSLGNYYAT

SEQ ID NO: 1822 - protein, 12 aa, synthetic construct
  REGION 1..12: note = Description of Artificial Sequence: Synthetic peptide
RASQSVSSAYLA

SEQ ID NO: 1823 - protein, 11 aa, synthetic construct
  REGION 1..11: note = Description of Artificial Sequence: Synthetic peptide
RASQSVSNSLA

SEQ ID NO: 1824 - protein, 12 aa, synthetic construct
  REGION 1..12: note = Description of Artificial Sequence: Synthetic peptide
RASQSVSSSFLA

SEQ ID NO: 1825 - protein, 12 aa, synthetic construct
  REGION 1..12: note = Description of Artificial Sequence: Synthetic peptide
RASQSVSTTFLA

SEQ ID NO: 1826 - protein, 11 aa, synthetic construct
  REGION 1..11: note = Description of Artificial Sequence: Synthetic peptide
RASQSISSYLN

SEQ ID NO: 1827 - protein, 12 aa, synthetic construct
  REGION 1..12: note = Description of Artificial Sequence: Synthetic peptide
RATQSIGSSFLA

SEQ ID NO: 1828 - protein, 12 aa, synthetic construct
  REGION 1..12: note = Description of Artificial Sequence: Synthetic peptide
RASQSVSSSYLA

SEQ ID NO: 1829 - protein, 12 aa, synthetic construct
  REGION 1..12: note = Description of Artificial Sequence: Synthetic peptide
RASQSVSSSYLA

SEQ ID NO: 1830 - protein, 12 aa, synthetic construct
  REGION 1..12: note = Description of Artificial Sequence: Synthetic peptide
RASQRVASNYLA

SEQ ID NO: 1831 - protein, 12 aa, synthetic construct
  REGION 1..12: note = Description of Artificial Sequence: Synthetic peptide
RASQSLSSNFLA

SEQ ID NO: 1832 - protein, 16 aa, synthetic construct
  REGION 1..16: note = Description of Artificial Sequence: Synthetic peptide
RSSQSLLHSNGYNYLD

SEQ ID NO: 1833 - protein, 12 aa, synthetic construct
  REGION 1..12: note = Description of Artificial Sequence: Synthetic peptide
RASQSVSSSYLA

SEQ ID NO: 1834 - protein, 12 aa, synthetic construct
  REGION 1..12: note = Description of Artificial Sequence: Synthetic peptide
RASQSVASSFLA

SEQ ID NO: 1835 - protein, 11 aa, synthetic construct
  REGION 1..11: note = Description of Artificial Sequence: Synthetic peptide
RASQDVNTAVS

SEQ ID NO: 1836 - protein, 15 aa, synthetic construct
  REGION 1..15: note = Description of Artificial Sequence: Synthetic peptide
RASESVSVIGAHLIH

SEQ ID NO: 1837 - protein, 15 aa, synthetic construct
  REGION 1..15: note = Description of Artificial Sequence: Synthetic peptide
RASESVTILGSHLIY

SEQ ID NO: 1838 - protein, 15 aa, synthetic construct
  REGION 1..15: note = Description of Artificial Sequence: Synthetic peptide
RASESVTILGSHLIY

SEQ ID NO: 1839 - protein, 7 aa, synthetic construct
  REGION 1..7: note = Description of Artificial Sequence: Synthetic peptide
AASSLQS

SEQ ID NO: 1840 - protein, 7 aa, synthetic construct
  REGION 1..7: note = Description of Artificial Sequence: Synthetic peptide
GASRRAT

SEQ ID NO: 1841 - protein, 7 aa, synthetic construct
  REGION 1..7: note = Description of Artificial Sequence: Synthetic peptide
LGSNRAS

SEQ ID NO: 1842 - protein, 7 aa, synthetic construct
  REGION 1..7: note = Description of Artificial Sequence: Synthetic peptide
EVSNRFS

SEQ ID NO: 1843 - protein, 7 aa, synthetic construct
  REGION 1..7: note = Description of Artificial Sequence: Synthetic peptide
LGSKRAS

SEQ ID NO: 1844 - protein, 7 aa, synthetic construct
  REGION 1..7: note = Description of Artificial Sequence: Synthetic peptide
GASTLAS

SEQ ID NO: 1845 - protein, 7 aa, synthetic construct
  REGION 1..7: note = Description of Artificial Sequence: Synthetic peptide
LGSNRAS

SEQ ID NO: 1846 - protein, 7 aa, synthetic construct
  REGION 1..7: note = Description of Artificial Sequence: Synthetic peptide
GASTRAS

SEQ ID NO: 1847 - protein, 7 aa, synthetic construct
  REGION 1..7: note = Description of Artificial Sequence: Synthetic peptide
GASIRAT

SEQ ID NO: 1848 - protein, 7 aa, synthetic construct
  REGION 1..7: note = Description of Artificial Sequence: Synthetic peptide
DASNRAT

SEQ ID NO: 1849 - protein, 7 aa, synthetic construct
  REGION 1..7: note = Description of Artificial Sequence: Synthetic peptide
AASSLQS

SEQ ID NO: 1850 - protein, 7 aa, synthetic construct
  REGION 1..7: note = Description of Artificial Sequence: Synthetic peptide
EVSNRDS

SEQ ID NO: 1851 - protein, 7 aa, synthetic construct
  REGION 1..7: note = Description of Artificial Sequence: Synthetic peptide
DASTLQT

SEQ ID NO: 1852 - protein, 7 aa, synthetic construct
  REGION 1..7: note = Description of Artificial Sequence: Synthetic peptide
GASTRAT

SEQ ID NO: 1853 - protein, 7 aa, synthetic construct
  REGION 1..7: note = Description of Artificial Sequence: Synthetic peptide
GASSRAS

SEQ ID NO: 1854 - protein, 7 aa, synthetic construct
  REGION 1..7: note = Description of Artificial Sequence: Synthetic peptide
SATSPVP

SEQ ID NO: 1855 - protein, 7 aa, synthetic construct
  REGION 1..7: note = Description of Artificial Sequence: Synthetic peptide
AANKSQS

SEQ ID NO: 1856 - protein, 7 aa, synthetic construct
  REGION 1..7: note = Description of Artificial Sequence: Synthetic peptide
LGSNRAS

SEQ ID NO: 1857 - protein, 7 aa, synthetic construct
  REGION 1..7: note = Description of Artificial Sequence: Synthetic peptide
DDSVRPS

SEQ ID NO: 1858 - protein, 7 aa, synthetic construct
  REGION 1..7: note = Description of Artificial Sequence: Synthetic peptide
RDKERPS

SEQ ID NO: 1859 - protein, 7 aa, synthetic construct
  REGION 1..7: note = Description of Artificial Sequence: Synthetic peptide
AASNLQS

SEQ ID NO: 1860 - protein, 7 aa, synthetic construct
  REGION 1..7: note = Description of Artificial Sequence: Synthetic peptide
GKNNRPS

SEQ ID NO: 1861 - protein, 7 aa, synthetic construct
  REGION 1..7: note = Description of Artificial Sequence: Synthetic peptide
GTNNRPS

SEQ ID NO: 1862 - protein, 7 aa, synthetic construct
  REGION 1..7: note = Description of Artificial Sequence: Synthetic peptide
GASTRAT

SEQ ID NO: 1863 - protein, 7 aa, synthetic construct
  REGION 1..7: note = Description of Artificial Sequence: Synthetic peptide
DASSRAT

SEQ ID NO: 1864 - protein, 7 aa, synthetic construct
  REGION 1..7: note = Description of Artificial Sequence: Synthetic peptide
GASSRAT

SEQ ID NO: 1865 - protein, 7 aa, synthetic construct
  REGION 1..7: note = Description of Artificial Sequence: Synthetic peptide
GSSNRAT

SEQ ID NO: 1866 - protein, 7 aa, synthetic construct
  REGION 1..7: note = Description of Artificial Sequence: Synthetic peptide
AASSLQS

SEQ ID NO: 1867 - protein, 7 aa, synthetic construct
  REGION 1..7: note = Description of Artificial Sequence: Synthetic peptide
GASQRAT

SEQ ID NO: 1868 - protein, 7 aa, synthetic construct
  REGION 1..7: note = Description of Artificial Sequence: Synthetic peptide
GASSRAT

SEQ ID NO: 1869 - protein, 7 aa, synthetic construct
  REGION 1..7: note = Description of Artificial Sequence: Synthetic peptide
GASSRAT

SEQ ID NO: 1870 - protein, 7 aa, synthetic construct
  REGION 1..7: note = Description of Artificial Sequence: Synthetic peptide
GASSRAT

SEQ ID NO: 1871 - protein, 7 aa, synthetic construct
  REGION 1..7: note = Description of Artificial Sequence: Synthetic peptide
GASNWAT

SEQ ID NO: 1872 - protein, 7 aa, synthetic construct
  REGION 1..7: note = Description of Artificial Sequence: Synthetic peptide
LGSNRAS

SEQ ID NO: 1873 - protein, 7 aa, synthetic construct
  REGION 1..7: note = Description of Artificial Sequence: Synthetic peptide
GTSSRAT

SEQ ID NO: 1874 - protein, 7 aa, synthetic construct
  REGION 1..7: note = Description of Artificial Sequence: Synthetic peptide
GASGRAT

SEQ ID NO: 1875 - protein, 7 aa, synthetic construct
  REGION 1..7: note = Description of Artificial Sequence: Synthetic peptide
SASYRYT

SEQ ID NO: 1876 - protein, 7 aa, synthetic construct
  REGION 1..7: note = Description of Artificial Sequence: Synthetic peptide
LASNLET

SEQ ID NO: 1877 - protein, 7 aa, synthetic construct
  REGION 1..7: note = Description of Artificial Sequence: Synthetic peptide
LASNVQT

SEQ ID NO: 1878 - protein, 7 aa, synthetic construct
  REGION 1..7: note = Description of Artificial Sequence: Synthetic peptide
LASNVQT

SEQ ID NO: 1879 - protein, 9 aa, synthetic construct
  REGION 1..9: note = Description of Artificial Sequence: Synthetic peptide
QQSYSTPYT

SEQ ID NO: 1880 - protein, 10 aa, synthetic construct
  REGION 1..10: note = Description of Artificial Sequence: Synthetic peptide
QQYHSSPSWT

SEQ ID NO: 1881 - protein, 9 aa, synthetic construct
  REGION 1..9: note = Description of Artificial Sequence: Synthetic peptide
MQALQTPYT

SEQ ID NO: 1882 - protein, 8 aa, synthetic construct
  REGION 1..8: note = Description of Artificial Sequence: Synthetic peptide
MQNIQFPS

SEQ ID NO: 1883 - protein, 9 aa, synthetic construct
  REGION 1..9: note = Description of Artificial Sequence: Synthetic peptide
MQALQTPYT

SEQ ID NO: 1884 - protein, 8 aa, synthetic construct
  REGION 1..8: note = Description of Artificial Sequence: Synthetic peptide
QQSYKRAS

SEQ ID NO: 1885 - protein, 9 aa, synthetic construct
  REGION 1..9: note = Description of Artificial Sequence: Synthetic peptide
MQGRQFPYS

SEQ ID NO: 1886 - protein, 8 aa, synthetic construct
  REGION 1..8: note = Description of Artificial Sequence: Synthetic peptide
QQYGSSLT

SEQ ID NO: 1887 - protein, 9 aa, synthetic construct
  REGION 1..9: note = Description of Artificial Sequence: Synthetic peptide
QQYGSSSWT

SEQ ID NO: 1888 - protein, 10 aa, synthetic construct
  REGION 1..10: note = Description of Artificial Sequence: Synthetic peptide
QQYGSSPPWT

SEQ ID NO: 1889 - protein, 7 aa, synthetic construct
  REGION 1..7: note = Description of Artificial Sequence: Synthetic peptide
QQSYTLA

SEQ ID NO: 1890 - protein, 9 aa, synthetic construct
  REGION 1..9: note = Description of Artificial Sequence: Synthetic peptide
MQGTHWPGT

SEQ ID NO: 1891 - protein, 9 aa, synthetic construct
  REGION 1..9: note = Description of Artificial Sequence: Synthetic peptide
QQYESLPLT

SEQ ID NO: 1892 - protein, 10 aa, synthetic construct
  REGION 1..10: note = Description of Artificial Sequence: Synthetic peptide
QQYNDWLPVT

SEQ ID NO: 1893 - protein, 10 aa, synthetic construct
  REGION 1..10: note = Description of Artificial Sequence: Synthetic peptide
QQYAGSPPFT

SEQ ID NO: 1894 - protein, 9 aa, synthetic construct
  REGION 1..9: note = Description of Artificial Sequence: Synthetic peptide
LQHDNFPLT

SEQ ID NO: 1895 - protein, 9 aa, synthetic construct
  REGION 1..9: note = Description of Artificial Sequence: Synthetic peptide
QHYYRFPYS

SEQ ID NO: 1896 - protein, 9 aa, synthetic construct
  REGION 1..9: note = Description of Artificial Sequence: Synthetic peptide
MQALQTPYT

SEQ ID NO: 1897 - protein, 11 aa, synthetic construct
  REGION 1..11: note = Description of Artificial Sequence: Synthetic peptide
QVWDSDSEHVV

SEQ ID NO: 1898 - protein, 9 aa, synthetic construct
  REGION 1..9: note = Description of Artificial Sequence: Synthetic peptide
QAWDDTTVV

SEQ ID NO: 1899 - protein, 9 aa, synthetic construct
  REGION 1..9: note = Description of Artificial Sequence: Synthetic peptide
QKYNSAPFT

SEQ ID NO: 1900 - protein, 12 aa, synthetic construct
  REGION 1..12: note = Description of Artificial Sequence: Synthetic peptide
SSRDSSGDHLRV

SEQ ID NO: 1901 - protein, 11 aa, synthetic construct
  REGION 1..11: note = Description of Artificial Sequence: Synthetic peptide
NSRDSSGHHLL

SEQ ID NO: 1902 - protein, 14 aa, synthetic construct
  REGION 1..14: note = Description of Artificial Sequence: Synthetic peptide
QHYGSSFNGSSLFT

SEQ ID NO: 1903 - protein, 10 aa, synthetic construct
  REGION 1..10: note = Description of Artificial Sequence: Synthetic peptide
QQFGTSSGLT

SEQ ID NO: 1904 - protein, 10 aa, synthetic construct
  REGION 1..10: note = Description of Artificial Sequence: Synthetic peptide
QQYHSSPSWT

SEQ ID NO: 1905 - protein, 10 aa, synthetic construct
  REGION 1..10: note = Description of Artificial Sequence: Synthetic peptide
QQYHSSPSWT

SEQ ID NO: 1906 - protein, 9 aa, synthetic construct
  REGION 1..9: note = Description of Artificial Sequence: Synthetic peptide
QQSYSTPYS

SEQ ID NO: 1907 - protein, 10 aa, synthetic construct
  REGION 1..10: note = Description of Artificial Sequence: Synthetic peptide
QHYESSPSWT

SEQ ID NO: 1908 - protein, 10 aa, synthetic construct
  REGION 1..10: note = Description of Artificial Sequence: Synthetic peptide
QQYGSPPRFT

SEQ ID NO: 1909 - protein, 10 aa, synthetic construct
  REGION 1..10: note = Description of Artificial Sequence: Synthetic peptide
QHYGSSPSWT

SEQ ID NO: 1910 - protein, 10 aa, synthetic construct
  REGION 1..10: note = Description of Artificial Sequence: Synthetic peptide
QHYDSSPSWT

SEQ ID NO: 1911 - protein, 10 aa, synthetic construct
  REGION 1..10: note = Description of Artificial Sequence: Synthetic peptide
QYYGTSPMYT

SEQ ID NO: 1912 - protein, 9 aa, synthetic construct
  REGION 1..9: note = Description of Artificial Sequence: Synthetic peptide
MQALQTPLT

SEQ ID NO: 1913 - protein, 11 aa, synthetic construct
  REGION 1..11: note = Description of Artificial Sequence: Synthetic peptide
QHYGNSPPKFT

SEQ ID NO: 1914 - protein, 10 aa, synthetic construct
  REGION 1..10: note = Description of Artificial Sequence: Synthetic peptide
QHYGGSPRLT

SEQ ID NO: 1915 - protein, 9 aa, synthetic construct
  REGION 1..9: note = Description of Artificial Sequence: Synthetic peptide
QQHYSTPWT

SEQ ID NO: 1916 - protein, 9 aa, synthetic construct
  REGION 1..9: note = Description of Artificial Sequence: Synthetic peptide
LQSRIFPRT

SEQ ID NO: 1917 - protein, 9 aa, synthetic construct
  REGION 1..9: note = Description of Artificial Sequence: Synthetic peptide
LQSRTIPRT

SEQ ID NO: 1918 - protein, 9 aa, synthetic construct
  REGION 1..9: note = Description of Artificial Sequence: Synthetic peptide
LQSRTIPRT

SEQ ID NO: 1919 - protein, 21 aa, synthetic construct
  REGION 1..21: note = Description of Artificial Sequence: Synthetic peptide
MALPVTALLLPLALLLHAARP

SEQ ID NO: 1920 - DNA, 63 bp, synthetic construct; identical to SEQ ID NO: 3
  misc_feature 1..63: note = Description of Artificial Sequence: Synthetic oligonucleotide
  source 1..63: mol_type = other DNA

SEQ ID NO: 1921 - protein, 45 aa, synthetic construct; identical to SEQ ID NO: 4
  REGION 1..45: note = Description of Artificial Sequence: Synthetic polypeptide

SEQ ID NO: 1922 - DNA, 135 bp, synthetic construct; identical to SEQ ID NO: 5
  misc_feature 1..135: note = Description of Artificial Sequence: Synthetic polynucleotide
  source 1..135: mol_type = other DNA

SEQ ID NO: 1923 - protein, 24 aa, synthetic construct
  REGION 1..24: note = Description of Artificial Sequence: Synthetic peptide
IYIWAPLAGTCGVLLLSLVITLYC

SEQ ID NO: 1924 - DNA, 72 bp, synthetic construct; identical to SEQ ID NO: 13
  misc_feature 1..72: note = Description of Artificial Sequence: Synthetic oligonucleotide
  source 1..72: mol_type = other DNA

SEQ ID NO: 1925 - protein, 42 aa, synthetic construct; identical to SEQ ID NO: 14
  REGION 1..42: note = Description of Artificial Sequence: Synthetic polypeptide

SEQ ID NO: 1926 - DNA, 126 bp, synthetic construct; identical to SEQ ID NO: 15
  misc_feature 1..126: note = Description of Artificial Sequence: Synthetic polynucleotide
  source 1..126: mol_type = other DNA

SEQ ID NO: 1927 - protein, 41 aa, synthetic construct
  REGION 1..41: note = Description of Artificial Sequence: Synthetic polypeptide
RSKRSRLLHSDYMNMTPRRPGPTRKHYQPYAPPRDFAAYRS

SEQ ID NO: 1928 - DNA, 123 bp, synthetic construct; identical to SEQ ID NO: 17
  misc_feature 1..123: note = Description of Artificial Sequence: Synthetic polynucleotide
  source 1..123: mol_type = other DNA

SEQ ID NO: 1929 - protein, 35 aa, synthetic construct
  REGION 1..35: note = Description of Artificial Sequence: Synthetic polypeptide
TKKKYSSSVHDPNGEYMFMRAVNTAKKSRLTDVTL

SEQ ID NO: 1930 - DNA, 105 bp, synthetic construct
  misc_feature 1..105: note = Description of Artificial Sequence: Synthetic polynucleotide
  source 1..105: mol_type = other DNA
acaaaaaagaagtattcatccagtgtgcacgaccctaacggtgaatacatgttcatgagagcagtgaacacagccaaaaaatccagactcacagatgtgacccta

SEQ ID NO: 1931 - protein, 112 aa, synthetic construct; identical to SEQ ID NO: 18
  REGION 1..112: note = Description of Artificial Sequence: Synthetic polypeptide

SEQ ID NO: 1932 - DNA, 336 bp, synthetic construct; identical to SEQ ID NO: 19
  misc_feature 1..336: note = Description of Artificial Sequence: Synthetic polynucleotide
  source 1..336: mol_type = other DNA

SEQ ID NO: 1933 - protein, 112 aa, Homo sapiens; identical to SEQ ID NO: 20

SEQ ID NO: 1934 - DNA, 336 bp, Homo sapiens; identical to SEQ ID NO: 21
  source 1..336: mol_type = genomic DNA

SEQ ID NO: 1935 - protein, 230 aa, synthetic construct; identical to SEQ ID NO: 6
  REGION 1..230: note = Description of Artificial Sequence: Synthetic polypeptide

SEQ ID NO: 1936 - DNA, 690 bp, synthetic construct; identical to SEQ ID NO: 7
  misc_feature 1..690: note = Description of Artificial Sequence: Synthetic polynucleotide
  source 1..690: mol_type = other DNA

SEQ ID NO: 1937 - protein, 4 aa, synthetic construct
  REGION 1..4: note = Description of Artificial Sequence: Synthetic peptide
RGDS

SEQ ID NO: 1938 - DNA, 63 bp, synthetic construct
  misc_feature 1..63: note = Description of Artificial Sequence: Synthetic oligonucleotide
  source 1..63: mol_type = other DNA
atggccctccctgtcaccgccctgctgcttccgctggctcttctgctccacgccgctcggccc

SEQ ID NO: 1939 - DNA, 72 bp, synthetic construct
  misc_feature 1..72: note = Description of Artificial Sequence: Synthetic oligonucleotide
  source 1..72: mol_type = other DNA
atctacatttgggcccctctggctggtacttgcggggtcctgctgctttcactcgtgatcactctttactgt

SEQ ID NO: 1940 - DNA, 126 bp, synthetic construct
  misc_feature 1..126: note = Description of Artificial Sequence: Synthetic polynucleotide
  source 1..126: mol_type = other DNA
aagcgcggtcggaagaagctgctgtacatctttaagcaacccttcatgaggcctgtgcagactactcaagaggaggacggctgttcatgccggttcccagaggaggaggaaggcggctgcgaactg

SEQ ID NO: 1941 - DNA, 336 bp, synthetic construct
  misc_feature 1..336: note = Description of Artificial Sequence: Synthetic polynucleotide
  source 1..336: mol_type = other DNA
cgcgtgaaattcagccgcagcgcagatgctccagcctacaagcaggggcagaaccagctctacaacgaactcaatcttggtcggagagaggagtacgacgtgctggacaagcggagaggacgggacccagaaatgggcgggaagccgcgcagaaagaatccccaagagggcctgtacaacgagctccaaaaggataagatggcagaagcctatagcgagattggtatgaaaggggaacgcagaagaggcaaaggccacgacggactgtaccagggactcagcaccgccaccaaggacacctatgacgctcttcacatgcaggccctgccgcctcgg
